(19) United States
(12) Patent Application Publication
(10) Pub. No.: US 2010/0304987 A1
(43) Pub. Date: Dec. 2, 2010

(54) METHODS AND KITS FOR DIAGNOSIS AND/OR PROGNOSIS OF THE TOLERANT STATE IN LIVER TRANSPLANTATION

(76) Inventors: Alberto Sanchez Fueyo, Barcelona (ES); Marc Martinez Llordella, Barcelona (ES); Isabel Puig Pey, Barcelona (ES); Antoni Rimola Castella, Barcelona (ES); Juan Jose Lozano Salvatella, Barcelona (ES)

Correspondence Address: TOWNSEND AND TOWNSEND AND CREW, LLP, TWO EMBARCADERO CENTER, EIGHTH FLOOR, SAN FRANCISCO, CA, 94111-3834, US

(21) Appl. No.: 12/522,120

(22) PCT Filed: Jan. 4, 2008
(86) PCT No.: PCT/EP2008/050057

§ 371 Date: Jan. 15, 2010

(30) Foreign Application Priority Data
Jan. 4, 2007 (ES) P 200700073

(51) Int. Cl. C40B 30/04; C12Q 1/68; C40B 40/06

(52) U.S. Cl. 506/9; 435/6; 506/16

(57) ABSTRACT

The long-term survival of transplanted grafts critically depends on the life-long administration of immunosuppressive drugs to prevent graft rejection. These drugs are very effective at preventing graft rejection, but they are also associated with severe side effects. Inventors have selected a set of genes whose expression characterizes the tolerant state in liver transplantation in humans. Based on the expression level profile of this set of genes, inventors provide a non-invasive method to assess diagnosis and/or prognosis of the tolerant state in liver transplantation in humans, and kits to perform it. These kits are simpler and cheaper than others based on a great number of genes, such as commercial microarrays with thousands of probes.

[0001] This invention refers to the field of human medicine, and specifically to the 5 diagnosis and/or prognosis of the tolerant state in a particular transplantation.

### BACKGROUND ART

[0002] The long-term survival of transplanted grafts critically depends on the life-long administration of immunosuppressive drugs to prevent graft rejection. These drugs are very effective at preventing graft rejection, but they are also associated with severe side effects, such as nephrotoxicity, an augmented risk of opportunistic infections and tumors, and metabolic complications such as diabetes, hyperlipidemia and arterial hypertension. Due to the side effects of immunosuppressive drugs, the induction of tolerance, defined as a state in which the graft maintains a normal function in the absence of chronic immunosuppression, is one of the main goals of research in transplant immunology. Tolerance induction is possible in a great number of experimental models of transplant in rodents. Nevertheless, the application of these experimental treatments in the clinic has been a failure to a large extent. Liver transplantation is the only clinical setting in which tolerance spontaneously occurs in a substantial proportion of patients. Indeed, complete immunosuppression withdrawal can be achieved in around 21% of patients (cf. J. Lerut et al., “An appraisal of tolerance in liver transplantation”, American Journal of Transplantation 2006, vol. 6, pp. 1774-80). Unfortunately, there are currently no means to identify these patients before immunosuppression withdrawal is attempted. For this reason, complete discontinuation of immunosuppressive drugs is rarely attempted in liver transplantation, and thus many patients continue to be unnecessarily immunosuppressed, with the health and economic problems that this involves.

[0003] One of the reasons why clinical application in humans of experimental treatments of tolerance induction has not been successful relates to the lack of an accurate tool to non-invasively diagnose tolerance in human transplant recipients. Recent publications point out the urgent need for this tool (e.g. N. Najafian et al., “How can we measure immunologic tolerance in humans?”, J. Am. Soc. Nephrol. 2006, vol. 17, pp. 2652-63; K. A. Newell et al., “Tolerante assays: measuring the unknown”, Transplantation 2006, vol. 81, pp. 1503-9).

[0004] Prior attempts to identify tolerance in transplantation, mainly of kidney and liver, have employed either antigen-specific functional assays or antigen-nonspecific tests. In the functional assays recipient T lymphocytes are challenged with donor antigens either in vitro or in vivo (cf. J. Cai et al., “Minor H antigen HA-1-specific regulator and effector CD8+T cells, and HA-1 microchimerism, in allograft tolerance”, J. Exp. Med. 2004, vol. 199, pp. 1017 23; E. Jankowska-Gan E et al., “Human liver allograft acceptance and the “tolerance assay”, Hum. Immunol. 2002, vol. 63, pp. 862-70; M. Hernández-Fuentes et al., “Indices of tolerance: Interim report”, abstract #999, World Transplant Congress 2006). These assays are very valuable from a mechanistic point of view, since they are the only tests capable of revealing which pathways are responsible for the specificity of the tolerance state. Unfortunately, these assays are also difficult to perform, highly variable from laboratory to laboratory (difficult to standardize), and require the availability of carefully cryopreserved donor cells. For these reasons, functional assays are not optimal for widespread clinical application, and are currently employed only in selected, highly specialized laboratories, and basically for research purposes.

[0005] The antigen-nonspecific immune monitoring tests constitute a variety of methodologies aiming at the phenotypic characterization of the recipient immune system, without the use of donor antigen challenges. Among these tests, the study of T cell receptor CDR3 length distribution patterns (TcLand) and peripheral blood cell immunophenotyping employing flow cytometry, have been employed to identify biomarkers characteristic of tolerance in humans. The TcLand technique has been employed in peripheral blood to discriminate between tolerant kidney recipients and recipients experiencing chronic rejection (cf. S. Brouard et al., “Operationally tolerant and minimally immunosuppressed kidney recipients display strongly altered blood T-cell clonal regulation”, Am. J. Transplant. 2005, vol. 5, pp. 330-40). However, this technique is expensive, is currently only available at one laboratory (Inserm 643 and TcLand Biotech in Nantes, France), and has never been validated in liver transplantation. The use of peripheral blood immunophenotyping has been used with peripheral blood samples from both liver and kidney tolerant transplant recipients. Two studies addressing this methodology are known to inventors. In the first one, from the University of Pittsburgh in USA (cf. G. V. Mazariegos et al., “Dendritic cell subset ratio in peripheral blood correlates with successful withdrawal of immunosuppression in liver transplant patients”, Am. J. Transplant. 2003, vol. 3, pp. 689-96), it is said that the ratio between pDC and mDC dendritic cell subsets could discriminate between tolerant and non-tolerant recipients in pediatric liver transplantation. In the second study, from Kyoto (cf. Y. Li et al., “Analyses of peripheral blood mononuclear cells in operational tolerance after pediatric living donor liver transplantation”, Am. J. Transplant. 2004, vol. 4, pp. 2118-25), it is said that an increased ratio between delta-1 and delta-2 gammadelta T cells in peripheral blood is more prevalent in tolerant than in non-tolerant liver recipients. However, none of these tests offers the accuracy required for the widespread clinical application.

[0006] While the chronic use of immunosuppressive drugs is currently the only means to ensure long-term survival of transplanted allografts, these drugs are expensive and are associated with severe side effects (nephrotoxicity, tumor and infection development, diabetes, cardiovascular complications, etc.) that lead to substantial morbidity and mortality. Hence, any strategy capable of significantly reducing the use of immunosuppressive drugs in transplantation may have a large impact on the health and quality of life of transplant recipients.

### SUMMARY OF THE INVENTION

[0007] Inventors have selected a set of genes, the expression of which characterizes the tolerant state in liver transplantation in humans. Based on the expression level profile of this set of genes, inventors provide a non-invasive method to assess diagnosis and/or prognosis of the tolerant state in liver transplantation in humans.

[0008] In this context, it is relevant to mention that gene expression profiling has been employed in both kidney and heart transplantation to identify rejection, and furthermore it has been proposed to detect tolerance in kidney transplantation (cf. S. Brouard, et al., “Identification of a peripheral blood transcriptional biomarker panel associated with operational renal allograft tolerance”, Proc. Natl. Acad. Sci. 2007, vol. 39, pp. 15448-53). Specifically in liver transplantation, one study about gene expression profiles of lymphocytes obtained from tolerant rat liver recipients has been reported (cf. Fujino et al., “Differences in lymphocyte gene expression between tolerant and syngeneic liver grafted rats”, Liver Transpl. 2004, vol. 10, pp. 379-91). However, gene expression technologies to detect tolerance have not been previously employed in human liver transplantation.

[0009] The invention provides a method of assessing diagnosis and/or prognosis of the tolerant state in liver transplantation in a human patient, comprising the steps of: (a) obtaining a biological sample from the patient; and (b) measuring the expression levels in the sample of a set of genes comprising the following twenty two: transforming growth factor beta receptor III (TGFBR3, NCBI Gene ID 7049), killer cell lectin-like receptor subfamily B member 1 (KLRB1, NCBI Gene ID 3820), asparagine-linked glycosylation 8 homolog (ALG8, NCBI Gene ID 79053), Fanconi anemia complementation group G (FANCG, NCBI Gene ID 2189), gem associated protein 7 (GEMIN7, NCBI Gene ID 79760), natural killer cell group 7 sequence (NKG7, NCBI Gene ID 4818), RAD23 homolog B of Saccharomyces cerevisiae (RAD23B, NCBI Gene ID 5887), SLAM family member 7 (SLAMF7, NCBI Gene ID 57823), TP53 regulated inhibitor of apoptosis 1 (TRIAP1, NCBI Gene ID 51499), protein phosphatase 1B magnesium-dependent beta isoform (PPM1B, NCBI Gene ID 5495), chromosome 10 open reading frame 119 (C10orf119, NCBI Gene ID 79892), T cell receptor delta locus (TRD@, NCBI Gene ID 6964), nucleolar protein family A member 1 (NOLA1, NCBI Gene ID 54433), DCN1 defective in cullin neddylation 1 domain containing 1 of Saccharomyces cerevisiae (DCUN1D1, NCBI Gene ID 54165), dystrobrevin binding protein 1 (DTNBP1, NCBI Gene ID 84062), N-acetylglucosamine-1-phosphate transferase alpha and beta subunits (GNPTAB, NCBI Gene ID 79158), proteasome 26S subunit non-ATPase 14 (PSMD14, NCBI Gene ID 10213), coatomer protein complex subunit zeta 1 (COPZ1, NCBI Gene ID 22818), S100 calcium binding protein A10 (S100A10, NCBI Gene ID 6281), ataxin 10 (ATXN10, NCBI Gene ID 25814), G-rich RNA sequence binding factor 1 (GRSF1, NCBI Gene ID 2926), and CD244 molecule natural killer cell receptor 2B4 (CD244, NCBI Gene ID 51744); wherein the corresponding gene expression levels above or below pre-determined cut-off levels are indicative of the tolerant state in liver transplantation.

[0010] As an embodiment of the invention, the expression of a second set of genes can be additionally measured. This second set of genes comprises the genes shown in Table 2. For that additional set of genes the following screening steps have been carried out: 1) analysis of additional blood samples from tolerant and non-tolerant liver transplant recipients; 2) use of a supplementary computational strategy based on the “Misclassified Posterior Probablility” (MiPP) algorithm in order to allow the prediction of tolerance based on a minimum number of genes; and 3) confirmation of all gene expression measurements employing real time reverse transcription PCR. In one preferred embodiment of the invention a subset of genes selected for their highest predictability either taken individually or in combination thereof, comprises the genes shown in Table 3.

[0011] References to genes are made with the name, symbol and Gene ID of the NCBI.

[0012] As used herein, the term “tolerant state” means the acceptance of a transplanted liver maintaining normal function in the absence of on-going immunosuppressive therapy. For the purposes of the current invention the terms “tolerance” and “operational tolerance” are considered as equivalent. The term “diagnosis” refers to the identification of tolerant patients among liver recipients receiving maintenance immunosuppressive therapy. The term “prognosis” means the capacity to predict the successful reduction/discontinuation of immunosuppressive therapy in liver recipients before treatment modification is attempted.

[0013] In an embodiment of the present invention, the gene expression levels are above pre-determined cut-off levels obtained from a control sample. In a particular embodiment, the control sample is obtained from a non-tolerant liver transplant recipient requiring on-going immunosuppression therapy, that can be called immunosuppression-dependent or non-tolerant (Non-TOL).

[0014] The differentially expressed genes are either up-regulated or down-regulated in a defined state. “Up-regulation” and “down-regulation” are relative terms meaning that a detectable difference (beyond the contribution of noise in the system used to measure it) is found in the amount of expression of the genes relative to some baseline. In this case, the baseline is the measured gene expression of the control sample. The genes of interest in the tolerant state are up regulated relative to the baseline level using the same measurement method.

[0015] The present invention provides means to use quantitative gene expression to diagnose tolerant liver transplant recipients before immunosuppressive drug withdrawal or reduction is attempted. The main application of this is the diagnosis of tolerant liver transplant recipients among patients receiving chronic immunosuppressive therapy. Consequently, it permits the dose reduction or discontinuation of immunosuppressive drugs in those patients identified as tolerant without undergoing rejection. This can result in a substantial decrease in the morbidity/mortality of drug-related side effects. This also means a significant decrease in the financial costs of therapy after liver transplantation.

[0016] Measuring the expression levels of the genes in the sample can be carried out over the transcripts of these genes (messenger RNA) or over the translation products, i.e. the proteins.

[0017] In a particular embodiment, measuring the gene expression levels is carried out using a microarray or a gene chip which comprises nucleic acid probes. Said nucleic acid probes comprise sequences that specifically hybridize to the transcripts of the set of genes defined above. At least one probe for each of the transcript must be on the microarray or the gene chip for detecting all the genes defined above, but it is possible to have more than one probe for the same transcript.

[0018] The term “specifically hybridize to” refers to the binding, duplexing, or hybridizing of a molecule substantially to or only to a particular nucleotide sequence or sequences under stringent conditions when that sequence is present in a complex mixture (e.g., total cellular DNA or RNA). “Hybridization” refers to the process in which two single-stranded polynucleotides bind non-covalently to form a stable double-stranded polynucleotide.

[0019] Microarray technology measures mRNA levels of many genes simultaneously thereby presenting a powerful tool for identifying gene expression profiles for a disease or a specific state. Two microarray technologies are currently in wide use. The first are complementary DNA (cDNA) microarrays and the second are oligonucleotide microarrays. Although differences exist in the construction of these chips, essentially all downstream data analysis and output are the same. Typically, a nucleic acid sample is prepared from appropriate source and labeled with a signal moiety, such as a fluorescent label. The sample is hybridized with the microarray under appropriate conditions. The microarrays are then washed or otherwise processed to remove non-hybridized sample nucleic acids. The hybridization is then evaluated by detecting the distribution of the label on the chip. The distribution of label may be detected by scanning the microarrays to determine fluorescence intensity distribution. Typically, the hybridization of each probe is reflected by corresponding pixel intensities. The signal intensity is proportional to the cDNA amount, and thus mRNA, expressed in the sample. Analysis of the differential expression levels is conducted by comparing such intensities for the test sample and for the control sample. A ratio of these intensities indicates the fold-change in gene expression between the test and control samples.

[0020] In a particular embodiment of the invention, the microarray is a cDNA microarray. In this format, probes of cDNA (˜500-5000 bases long) are immobilized to a solid surface, e.g., glass, using robot spotting and exposed to a set of targets either separately or in a mixture. This method, traditionally called DNA microarray, was developed at Stanford University.

[0021] In another particular embodiment, the microarray is an oligonucleotide microarray. In this format, oligonucleotides (˜20-80-mer) or peptide nucleic acid (PNA) probes are synthesized either in situ (on-chip) or by conventional synthesis followed by on-chip immobilization. The microarray is exposed to labeled sample DNA, hybridized, and the identity/abundance of complementary sequences are determined. This method, historically called DNA chip, was developed by Affymetrix, Inc., which sells its photolithographically fabricated products under the GeneChip® trademark. Many companies are manufacturing oligonucleotide based chips using alternative in-situ synthesis or depositioning technologies.

[0022] The microarray can assume a variety of formats, e.g., libraries of soluble molecules; and libraries of compounds tethered to resin beads, silica chips, on glass or other solid supports. A number of different microarray configurations, supports and production methods are known to those skilled in the art. Probes may be prepared by any method known in the art, including synthetically or grown in a biological host. Synthetic methods include but are not limited to oligonucleotide synthesis, riboprobes, and polymerase chain reaction (PCR). The probes may be labeled with a detectable marker by any method known in the art. Methods for labeling probes include random priming, end labeling, PCR and nick translation.

[0023] In a particular embodiment, the microarray or the gene chip further comprises one or more internal control probes that act for example, as normalization control probes, expression level control probes and mismatch control probes. Normalization controls provide a control for variations in hybridization conditions, label intensity, “reading” efficiency and other factors that may cause the signal of a perfect hybridization to vary between microarrays. Expression level controls are probes that hybridize specifically with constitutively expressed genes in the analyzed sample (“housekeeping genes”). Mismatch controls are oligonucleotide probes identical to their corresponding test or control probes except for the presence of one or more mismatched bases. Mismatch probes thus provide a control for non-specific binding or cross hybridization to a nucleic acid in the sample other than the target to which the probe is directed (false positives).

[0024] In other embodiments of the invention, measuring the gene expression levels of the genes is carried out by reverse transcription PCR (RT-PCR), competitive RT-PCR, real time RT-PCR, differential display RT-PCR, Northern Blot analysis and other related tests. In a particular embodiment of the invention, measuring the gene expression levels is carried out by quantitative reverse transcription PCR of RNA extracted from the sample. In a more particular embodiment, the RT-PCR comprises one or more internal control reagents. Another option is to conduct these techniques of gene expression quantification using PCR reactions, to amplify cDNA or cRNA produced from mRNA and analyze it via microarray.

[0025] In other embodiments, measuring the gene expression levels is carried out by detecting protein encoded by each of the genes with antibodies specific to the proteins or by a proteins chip. A protein chip or a protein microarray can assume a variety of formats, but commonly consists of a solid surface onto which enzymes, receptor proteins, antibodies or small molecules are immobilized and used as probes to detect proteins contained in the target sample. In another embodiment, measuring the gene expression levels is carried out by HPLC. Gene expression can also be detected by measuring a characteristic of the gene that affects transcriptional activity of the gene, such as DNA amplification, methylation, mutation and allelic variation. Such methods are known to those skilled in the art.

[0026] Other aspects of the invention are kits for conducting the assays described above. Since kits are based on the selection of a set of genes comprising the ones described above, kits are simpler and cheaper than others based on a large amount of genes, such as many commercial microarrays with thousands of probes. Thus, an aspect of the invention refers to the use of a kit for performing the method as defined above, comprising (i) means for measuring the gene expression levels of the selected genes; and (ii) instructions for correlating the gene expression levels above or below pre-determined cut-off levels indicative of the tolerant state in liver transplantation. In a particular embodiment of the invention, the means comprise a microarray or a gene chip which comprises nucleic acid probes, said nucleic acid probes comprising sequences that specifically hybridize to the transcripts of the set of genes defined above. Additionally, the kit further comprises reagents for performing the microarray analysis. In another embodiment, the means comprise oligonucleotide primers for performing a quantitative reverse transcription PCR, said primers comprising sequences that specifically hybridize to the complementary DNA derived from the transcripts of the set of genes defined above. Each such kit would preferably include instructions as well as the reagents typical for the type of assay described. These can include, for example, nucleic acid arrays (e.g. cDNA or oligonucleotide microarrays), as described above, configured to discern the gene expression profile of the invention. They can also contain reagents used to conduct nucleic acid amplification and detection including, for example, reverse transcriptase, reverse transcriptase primer, a corresponding PCR primer set, a thermostable DNA polymerase, such as Taq polymerase, and a suitable detection reagent(s), such as, among others, fluorescent probes or dyes that bind to double-strand DNA such as ethidium bromide or SYBRgreen. Antibody based kits will contain buffers, secondary antibodies, detection enzymes and substrate, e.g. Horse Radish Peroxidase or biotin-avidin based reagents.

[0027] Another aspect of the invention refers to the use of a microarray or a gene chip for performing the method as defined above, comprising a solid support and displayed thereon nucleic acid probes which comprises sequences that specifically hybridize to the transcripts of the set of genes defined above.

[0028] The practice of the present invention may also employ conventional biology methods and software. Computer software products of the invention typically include computer readable medium having computer-executable instructions for performing the logic steps of the method of the invention. The present invention may also make use of various computer program products and software for a variety of purposes, such as probe design, management of data, analysis, and instrument operation.

[0029] Finally, another aspect of the invention refers to a method for selecting or modifying treatment protocol, either before or after liver transplantation is performed, comprising the use of the method of assessing diagnosis and/or prognosis as defined above. Before liver transplantation, the invention permits to identify those patients that will eventually develop tolerance and therefore, can benefit from less aggressive immunosuppression strategies. If liver transplantation has already been done, the invention permits to adequate therapy to the patient status. Patient's therapy can be altered as with additional therapeutics, with changes to the dosage or to the frequency, or with elimination of the current treatment. Such analysis permits intervention and therapy adjustment prior to detectable clinical indicia or in the face of otherwise ambiguous clinical indicia.

[0030] As used herein, “the biological sample from the patient” can be whole blood, blood cells (leukocytes), bile fluid or cells there from, and can also include portions of hepatic tissue (in the form of fresh tissue, frozen sections or formalin fixed sections). As is apparent to one of ordinary skilled in the art, samples may be prepared by any available method or process depending on the subsequent analysis. Methods of isolating total mRNA are also well known. Such samples include RNA samples, but also include cDNA synthesized from a mRNA sample isolated from a cell or tissue of interest. Such samples also include DNA amplified from the cDNA, and an RNA transcribed from the amplified DNA.

[0031] Throughout the description and claims the word “comprise” and its variations are not intended to exclude other technical features, additives, components, or steps. Additional objects, advantages and features of the invention will become apparent to those skilled in the art upon examination of the description or may be learned by practice of the invention. The following examples are provided by way of illustration, and they are not intended to be limiting of the present invention.

### DETAILED DESCRIPTION OF PARTICULAR EMBODIMENTS

[0032] Inventors employed oligonucleotide microarray technology on blood samples from tolerant and non-tolerant liver transplant recipients, and they determined that tolerant liver transplant recipients exhibit a characteristic gene expression profile in peripheral blood. The inventors have finally identified a set of genes through several selection steps whose expression levels can be employed to diagnose the tolerant phenotype with high accuracy.

[0033] In order to select the set of genes shown in Table 1, the following methodology was followed by the inventors:

### Patients

[0034] Peripheral blood samples were collected from a cohort of 9 tolerant (TOL) recipients of adult cadaveric liver transplants (>1 year of successful immunosuppression discontinuation). For comparison, blood samples were obtained from 11 liver recipients in whom drug weaning was attempted but led to acute rejection requiring reintroduction of immunosuppression (immunosuppression-dependent or non-tolerant, Non-TOL). In NON-TOL recipients blood was harvested at least 2 years after complete resolution of the acute rejection episode. Samples were also collected from 10 age-matched healthy controls.

### Microarray Experiments

[0035] After blood mononuclear cell isolation employing a Ficoll-Hypaque layer (Amersham Biosciences, Uppsala, Sweden), total RNA was extracted with Trizol reagent (Life Technologies, Rockville, Md., USA), and the derived cRNA samples were hybridized to Affymetrix Human Genome U133 Plus 2.0 Array containing probes for 47000 transcripts (Affymetrix, Inc, Santa Clara, Calif., USA). The complete database comprised expression measurements of 54675 genes for 9 TOL and 11 ID samples. CEL files were processed, normalized and their expression values summarized using the gcrma algorithm included in bioconductor package (http://www.bioconductor.org). To identify genes differentially expressed between TOL and NON-TOL recipients, data from a subgroup of samples (9 TOL and 8 NON-TOL samples) were first analyzed employing a Bayesian methodology for differential analysis implemented in the program BADGE (Bayesian Analysis of Differential Gene Expression, http://www.genomethods.org/badge). The complete set of data were then independently re-analyzed employing the Significance Analysis of Microarray (SAM; V. G. Tusher et al., Proc. Natl. Acad. Sci. USA. 2001 vol. 98, pp. 5116-21) for 500 permutations. SAM is a method and software for detecting differentially expressed genes in microarray. Its permutation method maintains the inter-gene correlation structure and accounts for the multiple comparison problem automatically. The parameters to accomplish a predicted 5% percentage of False-positives (FDR) were set. Finally, the Prediction Analysis of Microarray program (PAM; R. Tibshirani et al., Proc. Natl. Acad. Sci. USA. 2002, vol. 99, pp. 6567-72) was used to identify the minimum gene set that differentiated TOL from NON-TOL samples. PAM is highly efficient at finding a relatively small number of predictive genes. We apply internal cross-validation and a threshold of 2.9 is used to obtain a selected list with overall error rate 5%.

### Real-Time TaqMan PCR and Flow Cytometry Validation Experiments

[0036] To technically validate the microarray results, the expression levels of a set of genes among the 628 genes identified with the program BADGE (CD94, IL1, IL23, TNFα, ICAM1, BAX, BCL-2, CD103, FASL, FOXP3, GITR, GZMB, TIM1, TIM3, HO1, IFNγ, IL10, IL15, TGFβ1, A20, PRF1, IL6) were quantified employing real-time PCR, with an ABI 7900 Sequence Detector System and Assays-on-Demand primer/probe sets (PE Applied Biosystems, Foster City, Calif., USA). For these studies total RNA was treated with DNAse reagent (Ambion, Austin, Tex., USA), and reverse transcription performed using Multiscribed Reverse Transcriptase Enzyme (PE Applied Biosystems). To quantify the levels of mRNA, expression of the target genes were normalized to the housekeeping gene 18S, and data were expressed as relative fold difference between cDNA of the study samples and a calibrated sample. In addition, immunophenotyping studies were performed employing the following antibodies: CD3, CD4, CD8, CD19, CD11c, CD14, CD20, CD28, CD45RA, CD62L, CD123, HLA-DR, αβ-TCR, γδ-TCR, Vδ1-TCR (from BD Biosciences, Mountain View, Calif., USA), Vδ2-TCR, Vα24-TCR (from Beckman Coulter, Fullerton, Calif., USA) and Foxp3 (Treg staining kit, eBioscience, San Diego, Calif., USA). For staining, aliquots of 100 μl of EDTA-anticoagulated blood were incubated at room temperature for 15 min with a combination of the appropriate antibodies. Stained samples were analyzed using a FACScalibur flow cytometer with Cellquest Pro software (BD Biosciences).

### Global Gene Expression Profiling can Discriminate Between TOL and Non-TOL Recipients

[0037] In the first analysis utilizing a subgroup of samples, BADGE analysis selected the genes with more than 99.5% and less than 0.5% chances of being more expressed in TOL as compared to NON-TOL recipients. This resulted in a total of 462 positively and 166 negatively changed genes. Among these 628 genes, expression levels of a set of genes (CD94, IL1, IL23, TNFα, ICAM1, BAX, BCL-2, CD103, FASL, FOXP3, GITR, GZMB, TIM1, TIM3, HO1, IFNγ, IL10, IL15, TGFβ1, A20, PRF1, IL6) were quantified by real-time PCR in order to technically validate the microarray accuracy. In all cases trends were similar to the gene expression patterns identified by the microarrays. These confirmatory PCR experiments indicate the feasibility of employing real-time PCR to directly assess the expression levels of the selected list of differentially expressed genes, without the need to perform whole-genome microarray studies.

[0038] In order to evaluate the statistical significance of the differentially expressed genes in the complete data set, we then employed SAM setting the parameters to accomplish a predicted 5% percentage FDR. This yielded a list of 68 statistically significant genes that could discriminate between TOL and NON-TOL samples with an accuracy of 95%. Independently, PAM was used on the same complete data set to find the smallest set of genes capable of accurately classifying samples in the TOL and NON-TOL categories. This resulted in a list of 34 probes fitting the 5% overall error rate criteria. Of our 68 probes from the SAM gene-set, 22 were also found by the PAM method. Thus, 44 of the probes from SAM approach are not required for classification. Additional computational cross-validation established that the consensuated list of 22 genes could classify samples within the TOL and NON-TOL categories with a 5% error rate. The following table (TABLE 1) shows the list of 22 genes that constitutes the minimal gene-set capable of discriminating between TOL and NON-TOL samples.

[0039] Flow cytometry experiments further validated the microarray results, in which only gamma delta T lymphocytes (expressing TRD@) among peripheral blood cells, were found to discriminate between TOL and NON-TOL recipients.

TABLE 1

| | Probe set ID | | Gene |
|---|---|---|---|
| Gene ID | (Affymetrix) | Gene name | symbol |
| 7049 | 240188_at | Transforming growth factor, beta receptor III | TGFBR3 |
| | | (betaglycan) | |
| 3820 | 214470_at | killer cell lectin-like receptor subfamily B, | KLRB1 |
| | | member 1 | |
| 79053 | 203545_at | asparagine-linked glycosylation 8 homolog | ALG8 |
| 2189 | 203564_at | Fanconi anemia, complementation group G | FANCG |
| 79760 | 1555751_a_at | gem (nuclear organelle) associated protein 7 | GEMIN7 |
| 4818 | 213915_at | natural killer cell group 7 sequence | NKG7 |
| 5887 | 214422_at | RAD23 homolog B (S. cerevisiae) | RAD23B |
| 57823 | 219159_s_at | SLAM family member 7 | SLAMF7 |
| 51499 | 218403_at | TP53 regulated inhibitor of apoptosis 1 | TRIAP1 |
| 5495 | 209296_at | protein phosphatase 1B (formerly 2C), | PPM1B |
| | | magnesium-dependent, beta isoform | |
| 79892 | 217905_at | chromosome 10 open reading frame 119 | C10orf119 |
| 6964 | 217143_s_at | T cell receptor delta locus | TRD@ |
| 54433 | 219110_at | nucleolar protein family A, member 1 (H/ACA | NOLA1 |
| | | small nucleolar RNPs) | |
| 54165 | 222679_s_at | DCN1, defective in cullin neddylation 1, domain | DCUN1D1 |
| | | containing 1 (S. cerevisiae) | |
| 84062 | 223763_at | dystrobrevin binding protein 1 | DTNBP1 |
| 79158 | 212959_s_at | N-acetylglucosamine-1-phosphate transferase, | GNPTAB |
| | | alpha and beta subunits | |
| 10213 | 212296_at | proteasome (prosome, macropain) 26S subunit, | PSMD14 |
| | | non-ATPase, 14 | |
| 22818 | 222386_s_at | coatomer protein complex, subunit zeta 1 | COPZ1 |
| 6281 | 238909_at | S100 calcium binding protein A10 (annexin II | S100A10 |
| | | ligand, calpactin I, light polypeptide) | |
| 25814 | 208833_s_at | ataxin 10 | ATXN10 |
| 2926 | 201520_s_at | G-rich RNA sequence binding factor 1 | GRSF1 |
| 51744 | 220307_at | CD244 molecule, natural killer cell receptor 2B4 | CD244 |

[0040] In order to identify the additional genes shown in Tables 2 and 3 the following methodology was followed by the inventors:

### Patients

[0041] Peripheral blood samples were collected from a cohort of 17 tolerant (TOL) recipients of adult cadaveric liver transplants (>1 year of successful immunosuppression discontinuation), and 21 Non-TOL liver recipients (recipients in whom drug weaning was attempted but led to acute rejection requiring reintroduction of immunosuppression, with blood being harvested at least 1 year after complete resolution of the acute rejection episode). In addition, blood samples were also collected from 16 age-matched healthy individuals and from 15 stable liver transplant recipients under maintenance immunosuppression (STA) in whom blood collection was performed before immunosuppression treatment was withdrawn (10 of the STA patients eventually rejected and turned out to be Non-TOL, while 5 did not reject and were therefore considered as TOL).

### Microarray Experiments and Data Analysis

[0042] Microarray data from samples of transplanted patients (17 TOL, 21 Non-TOL and 15 STA) were normalised using the GC content adjusted-robust multi-array (GC-RMA) algorithm, which computes expression values from probe intensity values incorporating probe sequence information (cf. Z. Wu, et al., “A Model Based Background Adjustment for Oligonucleotide Expression Arrays”, J.A.S.A. 2004, vol. 99, pp. 909-17). Next a conservative probe-filtering step eliminating those probes with a maximum expression value lower than 5 was employed, which resulted in a number of probes out of the original probe set. In order to eliminate non-biological experimental variation or batch effects observed across successive batches of microarray experiments the ComBat approach was applied, which uses nonparametric empirical Bayes frameworks to adjust data more correctly (cf. W. E. Johnson, et al., “Adjusting batch effects in microarray expression data using empirical Bayes methods”, Biostatistics 2007, vol 8, pp. 118-27). Significant Analysis of Microarray (SAM) was used to identify genes differentially expressed between the TOL and Non-TOL groups (17 and 21 samples respectively). SAM uses modified t test statistics for each gene of a dataset and a fudge factor to compute the t value, thereby controlling for unrealistically low standard deviations for each gene. Furthermore SAM allows control of the false discovery rate (FDR) by selecting a threshold for the difference between the actual test result and the result obtained from repeated permutations of the tested groups. Differential gene expresión was further explored by using the nearest shrunken centroid classifier implemented in the Predictive Analysis of Microarray (PAM) package to identify the minimal set of genes capable of predicting the tolerant state with an error rate <5%. This method incorporates an internal cross-validation step during feature selection in which the model is fit on 90% of the samples and then the class of the remaining 10% is predicted. This procedure is repeated 10 times to compute the overall error (ten-fold cross-validation). The PAM classifier was then used on the 38-sample set to perform multidimensional scaling analysis, and employed to predict class in the set of 15 samples obtained from STA patients. Additional classification models were constructed employing the misclassification penalized posterior (MiPP) algorithm (cf. M. Soukup et al., “Robust classification modeling on microarray data using misclassification penalized posterior”, Bioinformatics 2005, vol 21 p.p: i423-30). MiPP is a recently developed method for assessing the performance of a prediction model that computes the sum of the posterior classification probabilities penalized by the number of incorrectly classified samples. In this study MiPP was applied to the subset of genes selected by SAM at 5% FDR. The sequential selection of genes was made using the linear discriminant analysis (LDA) and/or linear-super vector machine learning classifiers (linear-SVM) together with a 10-fold cross-validation algorithm. MiPP implements an additional random-split internal validation strategy that is particularly well suited to datasets such as this one in which there is no clear distinction between training and independent test sets. In this random sampling procedure the full dataset is randomly split multiple times into training (⅔ of samples) and test (⅓ of samples) sets. This is repeated 100 times, and for each split a parsimonious gene model is identified and further evaluated by 100 additional independent splits.

### Differential Gene Expression Between TOL and Non-TOL Samples Employing Microarrays

[0043] Comparison of TOL and Non-TOL microarray data employing SAM yielded a total of 2341 and 88 probes with a FDR <5% and <%1, respectively. PAM analysis performed in parallel on the same two groups of patients resulted in the identification of a subset of 25 probes (corresponding to 23 genes all of them present in the SAM list) capable of correctly classifying the 17 tolerant and 21 non-tolerant recipients with an overall error rate of 0.026 (sensibility 1, specificity 0.914). Independent validation of the predictive capacity of this gene set was performed classifying the 15 STA patients employing PAM, Supervector Machine Learning (SVA) and Liner Discriminant Analysis (LDA) prediction algorithms. All 15 STA patients were correctly classified regardless of the class prediction tool employed. In order to determine if a prediction model including a minimum set of features could be obtained, we then re-analyzed the probes identified by SAM at 5% FDR utilizing a MiPP-based classification modelling approach. MiPP identified 90 classifiers comprising 2-10 genes exhibiting overall error rates <10%. Seventeen out of the 23 genes identified by PAM were present among the list of most parsimonious genes as assessed by MiPP. Overall, data analysis performed employing three different algorithms results in a series of concordant predictive models that contain a very limited number of features and exhibit high accuracy at discriminating TOL from Non-TOL samples.

### Real-Time TaqMan PCR Experiments

[0044] The expression pattern of a group of 56 target genes and 4 housekeeping genes (18S, GUS, HPRT and GAPDH) was quantified employing the ABI 7900 Sequence Detector System and LDA PCR cards (PE Applied Biosystems, Foster City, Calif., USA) on peripheral blood samples obtained from 16 Non-TOL, 16 TOL (selected among the 17 TOL and 21 Non-TOL patients in whom microarray experiments had been performed) and 16 healthy individuals individuals. For all PCR experiments total RNA was treated with DNAse reagent (Ambion, Austin, Tex., USA), and reverse transcription performed using Multiscribed Reverse Transcriptase Enzyme (PE Applied Biosystems). Target genes were selected based on their high differential expression between TOL and Non-TOL samples in the microarray experiments employing SAM, PAM and MiPP as previously described. To quantify the levels of mRNA we normalized expression of the target genes to the housekeeping gene HPRT1 and expressed the results as relative expression between cDNA of the target samples and a calibrated sample according to the ΔΔC_{T} method (results were similar when normalization was carried out employing the remaining 3 housekeeping genes). Results were analyzed employing an ANOVA test. In addition, both PAM and MiPP algorithms were utilized to select the minimal set of target genes with the lowest possible classification error. PAM analysis of the PCR data set resulted in the identification of 7 genes which are shown in Table 3. MiPP analysis identified 23 genes (Table 2), different from the original 22 genes shown in Table 1, which also exhibited very high predictive capacity.

[0045] In summary, in order to select the additional genes shown in Tables 2 and 3, the inventors have increased the number of patients (tolerant and non-tolerant) used for gene screening by microarray, have employed a new statistical method for gene selection, and have validated all results coming out from the microarray analysis employing quantitative PCR techniques.

TABLE 2

| | | NCBI |
|---|---|---|
| Gene | | Gene |
| Symbol | Gene Name | ID |
| CTBP2 | C-terminal binding protein 2 | 1488 |
| CLIC3 | chloride intracellular channel 3 | 9022 |
| KLRF1 | killer cell lectin-like receptor subfamily F, | 51348 |
| | member 1 | |
| IL2RB | interleukin 2 receptor, beta | 3560 |
| OSBPL5 | oxysterol binding protein-like 5 | 114879 |
| FEZ1 | fasciculation and elongation protein zeta 1 (zygin I) | 9638 |
| FLJ14213 | hypothetical protein FLJ14213 | 79899 |
| CD160 | CD160 molecule | 11126 |
| RGS3 | regulator of G-protein signaling 3 | 5998 |
| CX3CR1 | chemokine (C-X3-C motif) receptor 1 | 1524 |
| PTGDR | prostaglandin D2 receptor (DP) | 5729 |
| CD9 | CD9 molecule | 928 |
| PDE4B | phosphodiesterase 4B, cAMP-specific | 5142 |
| | (phosphodiesterase E4 dunce homolog, Drosophila) | |
| ERBB2 | v-erb-b2 erythroblastic leukemia viral oncogene | 2064 |
| | homolog 2, neuro/glioblastoma derived oncogene | |
| | homolog (avian) | |
| FEM1C | fem-1 homolog c (C. elegans) | 56929 |
| WDR67 | WD repeat domain 67 | 93594 |
| ZNF267 | zinc finger protein 267 | 10308 |
| ZNF295 | zinc finger protein 295 | 49854 |
| EPS8 | epidermal growth factor receptor pathway | 2059 |
| | substrate 8 | |
| IL8 | interleukin 8 | 3576 |
| NCALD | neurocalcin delta | 83988 |
| NOTCH2 | Notch homolog 2 (Drosophila) | 4853 |
| PTCH1 | patched homolog 1 (Drosophila) | 5727 |

TABLE 3

| Gene | | |
|---|---|---|
| Symbol | Gene Name | NCBI Gene ID |
| CTBP2 | C-terminal binding protein 2 | 1488 |
| CLIC3 | chloride intracellular channel 3 | 9022 |
| KLRF1 | killer cell lectin-like receptor subfamily F, | 51348 |
| | member 1 | |
| IL2RB | interleukin 2 receptor, beta | 3560 |
| OSBPL5 | oxysterol binding protein-like 5 | 114879 |
| FEZ1 | fasciculation and elongation protein zeta 1 | 9638 |
| | (zygin I) | |
| SLAMF7 | SLAM family member 7 | 57823 |
| CD160 | CD160 molecule | 11126 |

[0046] The selection of the most relevant genes shown in Table 3 and whose expression should be preferably measured, was based on sensitivity and specificity parameters. Table 4 shows the individual values for each of the aforesaid seven genes included in Table 3.

TABLE 4

| Gene symbol | Sensitivity | Specificity | Mean Error Rate |
|---|---|---|---|
| FEZ1 | 0.81 | 1.00 | 0.91 |
| CTBP2 | 0.75 | 1.00 | 0.88 |
| CLIC3 | 0.81 | 0.93 | 0.87 |
| SLAMF7 | 0.81 | 0.93 | 0.87 |
| KLRF1 | 0.88 | 0.80 | 0.84 |
| OSBPL5 | 0.75 | 0.87 | 0.81 |
| IL2RB | 0.94 | 0.67 | 0.80 |
| CD160 | 0.81 | 0.80 | 0.81 |

[0047] Sensibility (Sens) and Specificity (Spec) and Mean Error Rate (MER) values were calculated as follows:

Sens=TP/TP+FN

Spec=TN/TN+FP

Mean Error Rate=Σ(FN+FP)/(TP+TN+FP+FN)/N

### Where:

[0048] TP=true-positive;
TN=true-negative;
FN=false-negative;
FP=false-positive.
N=number of samples measured

[0049] As a way of example, a value of 0.81 of sensitivity means that 81% of the tolerant patients has a given gene above or below the predetermined cut-off levels. A value of 1.00 of specificity means that none of non-tolerant patients has the expression of the given gene above or below the predetermined cut-off levels. Concerning MER, a value of 0.054 means that only 5.4% of the samples wherein the expression of a give gene is above or below the predetermined cut-off levels. are not correctly identified.

[0050] Also, expression of combinations of any of the genes of said subset among themselves or with other genes pertaining either to Table 1 or 2, gives mean error rates which qualify those combinations as highly relevant for the assessment of diagnosis/prognosis of tolerance to the transplant. In Table 5, combinations of genes resulting in mean error rates ≦8% may be shown.

TABLE 5

| Gene Symbols | | | | | | | MER |
|---|---|---|---|---|---|---|---|
| CTBP2 | CLIC3 | FANCG | CD160 | C10orf119 | WDR67 | | 0.054 |
| CTBP2 | IL2RB | GEMIN7 | GNPTAB | RGS3 | CLIC3 | SLAMF7 | 0.055 |
| CLIC3 | CTBP2 | WDR67 | PDE4B | PTGDR | | | 0.058 |
| CLIC3 | CD244 | PDE4B | WDR67 | NOTCH2 | PTGDR | | 0.062 |
| CTBP2 | CLIC3 | GEMIN7 | FEZ1 | PDE4B | WDR67 | | 0.063 |
| CTBP2 | CLIC3 | WDR67 | C10orf119 | PDE4B | | | 0.063 |
| CD160 | FLJ14213 | | | | | | 0.064 |
| EPS8 | IL2RB | | | | | | 0.064 |
| CLIC3 | PDE4B | WDR67 | | | | | 0.065 |
| FEZ1 | CLIC3 | CX3CR1 | EPS8 | CTBP2 | SLAMF7 | | 0.065 |
| CLIC3 | WDR67 | CTBP2 | CD160 | ZNF295 | SLAMF7 | | 0.066 |
| CLIC3 | OSBPL5 | EPS8 | PTCH1 | SLAMF7 | FEZ1 | | 0.066 |
| FEZ1 | CLIC3 | PDE4B | WDR67 | | | | 0.069 |
| CLIC3 | EPS8 | WDR67 | PDE4B | | | | 0.07 |
| CLIC3 | CTBP2 | SLAMF7 | IL2RB | | | | 0.071 |
| SLAMF7 | KLRB1 | C10orf119 | COPZ1 | GRSF1 | | | 0.073 |
| SLAMF7 | KLRF1 | RGS3 | CTBP2 | | | | 0.074 |
| CTBP2 | IL2RB | FEZ1 | CLIC3 | | | | 0.074 |
| CTBP2 | CD160 | CX3CR1 | CLIC3 | | | | 0.075 |
| FEZ1 | CLIC3 | CTBP2 | | | | | 0.075 |
| CLIC3 | PDE4B | WDR67 | | | | | 0.075 |
| CLIC3 | FEZ1 | CTBP2 | SLAMF7 | | | | 0.077 |
| CTBP2 | CLIC3 | | | | | | 0.078 |
| CLIC3 | CTBP2 | | | | | | 0.078 |
| FEZ1 | CTBP2 | CLIC3 | KLRF1 | IL2RB | | | 0.078 |
| CLIC3 | CX3CR1 | WDR67 | | | | | 0.078 |
| CLIC3 | CTBP2 | | | | | | 0.079 |
| FEZ1 | CLIC3 | | | | | | 0.079 |
| CTBP2 | CLIC3 | | | | | | 0.08 |
| CLIC3 | KLRF1 | SLAMF7 | | | | | 0.08 |
| CTBP2 | CLIC3 | | | | | | 0.08 |

The application's sequence listing, which the Patent Office published only in electronic form, follows.

SEQUENCE LISTING (45 sequences)

SEQ ID NO: 1 - DNA, 203669 bp, Homo sapiens
ggagggcagtcggcggctctcgcgccccggccactttccctgcgcgattcccggagctccctgcaggaggtgagagtccccagcgggtccggatggcgtagttttgccgcggcgcagcagctgccggagctcgccgccgccgagcgctgggcggggaaacttgccgccgctttcctccaacttgctgcgggtggatctccgctggacacaccgcctccgaggtacgtgccggcccagccccgcggcgctgcagcccgcccgggctgtgggctctgcaggctgcgcgggtgcccgtcggcgcggcgcgggctgccagtgcctacttaccggccagggtcgctccagccgccaggacctccggccttgggagggaggcgctggtggggcggtgtttaccctccggggagcaggcaccggtggccagcggtgcgtgggcagcggccgcacggggcaggcagtgcccccggcgatgcgcagtgctggggaggaattctccacgcccgccctcactcttcctctccgcgggtccttctgacccctgcggggcgcggcggccacttccctccgggcgcgtgacagcttcggtgggaatggtttgttgtgggttcgcagtcaattgccgtggcccaggctgtggctcccggactcgtgcacggacgcggtttgcgttccccgctggccgcgccctcagggtgccttgcgggctgagccgcaagctgcagctcggcccccccccgccccggtttattttgaaggctctcttcttgtattcatttggttaggacaaacttggaaatcttggactgtcgctagaagaatctgcttgcagacttgatcttattagggcatttgccccgctttgcagaatcgcatagtgtcaggagccgacgtgtcaagcatgaattaccttggcaaagtagaacttagtggatttggtgtcctcacgaaaagctggaagaagaaaaccgttccatttccctagctgtgaagtgaggatagtagtacttgccccgtaaagttgctgtgagcatctaatgatttaatgtgtgtgaggtgctacaacagtgcttggcaccgagtaagcaccgcacggaggttagcgctgcttgccgctagccctgcggtggcaggataggagcggcgagggcagaggatagtaggagtgacaggctgtgctggggaaccaggcgtattctgagttttatgtccttccgaagaagtgagcggtttgggagaagtctccacaggtagtaaaaacacacgtcaagaccgtttcttcttcctgaatgcagagtgcaaacagttacttcagtgtgaactcagttgtttcttttggataataataacagctaacgttttctaagcccatactgtgtgcacttaatcctcacagcatctctatgggaaaagcactattaataaccctattttacagataagacactagaggttaagttacttgtccaagatcatacataactttctgttagttctgactccaaagctaccttccttcctcagcggagagcggcaagtgcaggccgatttgtgtgtacatagatttgtgtgcatagtccatgcatcttctcccatctttcagctttctatttgagctgaacgcatatctcttgaaacacacataaggtatctgtgatgaatttaggcgattttacatacttatgagggtgcccaattaaagttcctctgaaactggccccaaataattataaatagaactctgacttgtattaattaacatggaaatttttttttttttttggtgacagagtctcgctctgtccccaggctgcagtgcagtggtgcgatctcggctcactgcaacctccacctcccgggttcaagagtttctcctgactcagcctccagagtagctgggactacaggcgcgcgctaccacgcccagctaacttttgtatttttagtagagacggcgtttcaccatgttggccaggatggtctcgatttcttgacctcgtgatccacctgcctcggcctcccaaagtgctgggattacaggtgtgagccaccacgcctggccaacatggatctttattcttaatttcttttattaattctccagacattgttgatcaccattacttggcttccttaggaaacagcttggggttggcacaggaggcagggaaataattcttacccccttaagggctattaacatgaaattgatttcatgccattgtgtcagttaaaggatgttgctctatttcttgctgttctttgcttttggctttatttctgcattgtttagtgtttcaaggcttgagcgttttttttttttggcccttcagtttgacatttgtcaactttaatttttcctgttttgatggaatctgaccgttacacggcagctttgcctaacaactgttgattcagctcatgtttttaaatataaaaatcaccaacatagttttgaatcccagcacttcaaaggcaacccgtggggagttcattgttattttgaatattagtcaatagggggagcataacacactgttgatatctataaggcgcataaacccgtttttagagtattaaacatatagtttgaaaggggagggcaaaatatctagcaaaataactaagttgcttttggagtttataatggaggactagatttaatttgaactgattaagaatgaccttgaggacagggcctgtatgttgaatatatgtcaagaactccatggtggctggacagatagataaacacacatatagttttttttcaatttgtttccttaagtggtgtgtaggccaggcacagtggctcacacctgtaattccaacactttgggaggctgaggtaggaggatcacttggccaaggagttcgagaccagcctgggtaacatagtgagacccccatctctttaaaaagtgaagtttgtatgtaaactaattttgtgtggtttgaataatatttcaacttacctgggagaaatggaaatccagaggaatttgttgtgaatccttttgtaatgatcctcatttgtgttttgtagaaaactgaatataatgaatttgttctcagggaggttggtgtgttcacaatcctgtcatcatctttcattaacatcttctaagtgcaagacaataggggatcagtaatcctaaataacagcagttctattactgtgaattcctcagaggcttacgttaatattcaagtatagtagtagttcagatgtatcatatttgatactagtataagtgtgatgtgtctatgaatactcatacttgtaaacataaacaataagaatatgcttgaaaaaatcacacttgacatttatctatttatttatttattttttgagatggagtctctcgctctgtcgcccgggcgggagtgcagtggtgcaatctcagctcactgcaagctccacctcccaggttcacgccattctcctgcctcagcctccccagcagctgtaactacaggcactcgccaccatgcccggctaatttttttgtatttttagtagagacggggtttcaccgtgttagccaggaaggtctcgatctcctgaccttgtgatccgcctacctcagcctcccaaagtgctgggattacaggcgtgagccacggtgcctggccaaacttgacttttaaaaaaagtttttggctgggtgtggtggctcacgcctgtaatcccagcatgttgggaggccgaggcaggtggatcacttgaggtcaggagttcgagaccagcctggccaacatggcgaaacctgatctctacagaaaatacaacaatttgctgagcgtggtggtgcacacctgtaatcacagctactccagaggctgaggtgggaggatcccttgagcccaggaggtggaggtttcagtgagctgagatcgtgccactgcacgccagcctggcagacagcgaggttctgtctcaaaaaaaaaaaaaaaaaaggttttcaatttttgtctgtagttttgtaggccagtttcctttcttgtttcttgcgtattatgtagtatttttttattatttatttatttatttatttttgagacaaagtttcgctctgtcgtccaggctggagtgcagtggagtgatcttggctcactgcaacctccgcctcccaggttcaagagattctcctgcctcagcctcccgagtagcggggaccacaggtgcatgccaccacgcccgactaattttttatatttttcgtagagacggggcttcactgtgttagccccgatggtcttgatctcctgacctcatgatccacccgcctcggcctcccaaagtgctgggattataggcgtgagcgactgtgcccggccccatattatgtagtattgatttacctttatttcatttactacgttagggtcccatggatcctattttaaaataactttcaaaattagttgagtcccttctttttaaatcttagcattgcgcttatactacagagtggcatttatttaggatctcatttagtcttctatgctttgctctagtttactcgagtaattcaacaaacacttataacctcctactccctactaggctatggtttctggtcttggagcttggcaaattaattgtccttattcagtgctctgatgactgggggccaaaatgccttcaggttgcttagggctttcttacagaaagcctttcgttggcttgaaggaaagtgttgttccattgtttttaagactcaaaagaattaatttttctctcttgcatgcaaacttggttgtgacttgtaaaagtcaggtgagtgcttgtttttctgagggcagaatctgagcctaagagcccagggaactcaactgtcctttgagttttaagaaggtgatcactgctgacttctttagtatataagtgaagaccaatttcctggcttcaaaaatctgtgaaaggtcctgactttacattttaagcttaacagacagaacagttagagtttagactgtgactgtgtaagtaataactttgctgtaatattttgcctggatgattctgctctgtggtcattttgaattacctcccttcttgatagttcattttgaaacatctttttgtggtgctttcattgctgttggataaaaattgtaattgtcagatttattttttatttttatttatatacttattcatataaaatatgtaaatatatgtaaaatctcacatatatataatctataactatatattgtataatatataatatgtatatattttgagacagagtcttactatgttgcctcggctggtctcgaactcctgggctcaagtgatcctcctgcctcatcttctcaaattgttgggattacaggcatgagccactgctcctggctgtcagatttattagctactaaaggacagtcttctttttcagtcttaacagttacttaaaagtgattttattgccatttccatcagtctactggagcatttttcttatatttttatttttatttttattttttttgggacggagtctcgctctgtcacccagggtggagtgcagtggcgcgatctcggctcactgcaagctccgcctccctggttcacgccattctcttgcctcagtctcccgagtagctgagactacaggcgcccgccaccacgcccagctaatttttgtatttttagtagagacagggtttcaccgtgttagctaggatggtctcaatctcctgacctcgtgatccgccgtcttggcctcccaacgtgctgggattacaggtgtgagccatcgcgcccggccatatttttaaacttatttaaaacaattgtaaatttaaaaaatgttaacttttttgaaatttgcataacttgagttagataaatgtttttaggggcctttaatgtaaaagcagtcttgtattgccactaggaatataagcaatttggaatttaagagtgaatctaggttatatgaaaagctaaccttaaacacataatagtgagccttcagcagattgagtgagggcatttctgtaggaagaaaattaagtgtaccaagagccatagcagtaacttctctggttctgcatcttcagagtaacacttggaatgatagcattgtttctttgcagcatgtcataaaacacaagctgttgctaatttgttcagtgtctagtcaagctgaaataaatcaacacagcttggaagggccttacaagaaggatctgggttcatttcctgggctctgtccaggaaatatagaaatataataaataaatctaggaatataaaatttctagatttcttattttatatcttttgaaatagcacatttgtttgttaactgacattgagctttattttctctgcttgcaaagtccttgcttaagaatcagcacaaatttccaagcattcttcctccccacttgaataatgattttgatgtcttgctctctcaaccaaaatgtgtttttgaaacaacattgatataaattctgcatgaggctactgtcatttggaacttattcttcattttttattcttcagtttttcaggccaaagatgaagacttaataggctgacaactgcttatgagggatagagaccatatttaaaatggaaggtctagaacaagagccccagaaccatgccttcaggccatcctaatgtgccctgctgaagataattttttggtgtcggggggcagggcagggagcctaatgtctggtttttgtggtggtggttcttttatgttgaaatcttcttccatcctgggaagaggattcagttatatgtagagcctagcaaagttgatttttagaattagattttaatggttatttttttttttgagacagagtcttgctctgttgcttaggctggagtgcagtggtgtgatcttggctcactgcaacctctgcctcctgggttcaagcgattattgtgcctcagcctcccaagtaactgggattacaggcgggggccaccacatctggctaatttttgtatttttagtagagacagggttttgccatgttgtccaggctggtctcgaacttctggcctcaagtgatctttccccctcagcctcccaaagtgcagggattacaggcgtgagccaccatgcccgcaagcccactttaatgttaaactgttgccaagataatttagaattaagtctgaaatgttagctctatctttacttaaaaaatggttataaagaagcgtatactttctggacattggactcctagtgaagggggcctttggagttgggtgttgtttgcaggaggacgaaacacctgcttttctgtccttccaggcacataattcatttctctggtatatgccgaaggtcaggttttttgtgtaaaattgctgatggatcatttgtaaaaacacatttaagttgattagtccttgaaaaatgatctttagaaaatgatctttacagatactagtccttgagctttcctgtggatcagattgccttgggcgaaggtctgcagtttcacaagcatgactcactaccttttataggtgagaacatcaaatgggccaggtggagggtctagtagaactctggatttctttttaaatttgtatcatactattttgctaatggaaacttgatgaatacttaattccatctggcaagtgaaaagggtcccttttgggagtattcgttttgttagcatttttagtgatttattgttttgacagtgtgatattggtccttggatgcaaaaatactctggagactatttggaaatttcattttataattaactaactgtgtgataattgctggagcagaatgtgtgttttttttttttttcttttcattctggaaggttatttgaggtgaaaaacttagattctaatcacaaaggcttgtgttcatgtggtaccctgagtacttttgtaagatactcactgtgttgctgtgagttatctcttttatggttttttctttaaaacaaaactcttctgagtctccataaagaataagtatctcattttgttatattagattttgtgcagttggctggcaaattaaatttaactttgagggaaagcaccattgactcattacatacattttgcatcattgcagcgtaaggtcttccctatgtgtgtgggagaagtttctgatctaaatgggcatgtttcctattgctggtctatcttttagccaaagcatttctgaatagacattcctattcattttcttattttcgagactttagagagattgctacttgttatgtattcgtgataaatcatctgaatcctgaaaaaaatacttatgccaacagcccattttgtaaagacacttgtctttgagcttttaagctgtcatactcattattcgttacaatagctgtacagccattggatgtatcatgtttttgacacaggagctaggggaaggatgacctacttgttgcatttcacatttttccatatttatatcttttttcaatttgtggcatctttatttcattgttagagtggttgttctctaagacgttccaggttttaatttcattcactgtgtgggctaaataaggagctttcctgtagaaccaattctactaaattcctgaaaatgtcagttaaaaattagccaggcatggtggtgtgtgcctgtagtcccagcttctcaggaggctgaggcaggaggatggcttgagccaggaggtcgaggctgcagtgagtcatgatcataccactgcactccagcctgggtgacagagtgagaccttgtccctacccccaccacacacacaaaaaaagaaaatatgaagaaaaaagaaaatgcttccaaaaagtatcccatctagataccatgctggttagggcttttggtcatgtttgaatgggacatagctgaacacagagcaggatttcaatgggtaggctaggaaaaggagaggagtgtctaatttgttgggagaaaatccacttttgcataataataggggatttacgtgttttctttggagttaatatgtatttcaagtaggtagataggtaagaggtttgcaaaaaaattttgctaaggttgaggttctgtagttggcaactcttataaccctgaagatcctgttctctaaagccaggaaaaagcagtctgtttccaattatgtatcacaaaaaatagtgaaattaagccaagaaaaatgatcatttgggagttgggttgcttttttttttgcagagggtaaaggagaaaggactgtagacacacattttaaagaatctgctagtttttctgttggctttcagatttttctcaaatgctctgtattggaaattaagaataattttaggattaaaggccttttcctccttcggcttctttttgtttctcagagagcaaatagaagagcatttaggcagtttttgctgacatgaaagggtttgggtccagtgttccgggacccagcttgtgtttttggtaaagccttttcctgcctgaatggtcccaggttatgggctcacagcatcatacctggtagtggtgctatggtttttgttatatgaatttttttaccatgctttgaactgaaatgtagtccctgctgcctagcattattctgctggaggagaaaactagggatgttagtgtgggaaaggtatggaggtgcgaagcctagcatttggatgatgtgtgggtgaatatattgtcctcagcacttgtcagaagcaactagcctttcgggatgcctactgctagtttcaggattagtggtcctgtgagacctaggtgttaactaagaaatctcctttccactgccagaagatcagccccggcaggtcttagttcctgtttctcacaccttacacctccacagagtgttgaataagactttcctgatgctgcataatctttgataactcttagtcttgtcactgaggctaatgtgttttagctcttggtgcttttcttctcacctcccatttactcttctgcctgctgctggctcccacgcccaccacacccccaccacacccccatgaggtgctagaagaggtgtgaagtacggagtgcaaagttgcatttgctgctttactatcctttttcccccattttttttcttggtttccctgaaacgagttctcctggttttcctcttatgttccggatgtctcttcagtcttccattttgtttctttttctttctttttttttttttttttttgagacggagtctcactctgttgcccaggctggagtgcattggcacgacgttggctcactgcagtctccgcctcctgggttcaagcaattctcctccctcagctgcacactcccaccccccccccccgcccgagtagctgggattacaggtgtgcgccaccatgcccagctaatttttctatttttagtagagacaaggttttgccatgttggccaggctggtcttgaactcctgacctcaggtgatctgcctgcctcagcctcccaaaatgctgggaatatagacgtgagccacagtgcccagcccagtcttccttttcaatgcttgatccctatgggttgacattttccaaggttgcattttcctttcctcctctcctctcccctcttcttttctttttcttgtcttttcagtctacattgagttgctcatatttctgtgcttcaatatcagcagctccctgttttttcacacccatatttccaacagcctatcggacagtgccatctggttgttctgtagatttttctgttacagtccaaaagccaccatattacttctctgtggtccacagcctccacagtgtcaccttctgtatttcccatgtccctccttctctatgggggttcctgcttactcttccaggctctcactgctgccagctcctccagtggggcttcatgtggctcctcctggcaggtgcttctcttgctgcctcgtgagaatgttgtttttccttcggcagattccccagagcaggattgagtcttaccatcttggtattctaggtgtgtagcatgggcctggtttatagatatattgtcaaatggaattcttcatttcagcccacttcagttatggctttggggaaagatcaggcttacagttgatataaattatagctatagaaaagacacagaaaatcaactcagaatcatagagtttagggttacagtggggcttagaataatcttccttaagtttctctaaagatgagaacaaccagagagcagtgtttctcttcttgcccctctgcagcctagttcccacccaatagccagaatgattgtgataaaacctaagtcagattccttcattcccttgcttaaaacactctaggctgggcgcagtggctcacgcctgtaatcccagcactttgggaggctgaggcaggcggatcacaaagtcaggagtttgagaccagcctggccagcatggtgaaaccccgtctctactaaaaaaaaaattagcctggcatggtggtgggcgcctgtaatcccagctactcgggaggctaaggcaggagaatcgcttgaacccaggagacggaggttgcagtgagctgagattgcaccactgcactccagtctggtgacagagtgaccaaaaaaccaaaaaaccactctactgtttattcttgtctttctcagaataaaagccagaattcttacagtgatctgcaaagccctgcccaaccagcccaccactcttatgctggtgacccagttgacttccctcttgtgctctctaggctgctcaatctgctccagctgccgcacctgactgttggtccctgagcacgccagatacgctctgtctcagggcctttgcatgtgctgtttcctttgcttggaatgtttttccccaaatagctacagaattcgcttctgttaggtccttactcaaaacagacaaaccaaaccaaaaccccacacacatactttgtctctcccttttctgctttgttttcttagcattggtctctatataatatataattatgtatcttgtttatagtctgtctcctttagctagaatgaaagctccatcagggcagggatttttatgttttgttctctgttgaatacccacacctggaacagtcctggcatgaagcaggcacttgataaacattattaaatgaataagaagcattttatggatttcttttttttttttttgtggcagggtctcactctgtcacccaggctagagtgcagtggcacaatcttggctcactgcaacctctgcctcccgggttcaagccattctcctgcctcatcctcccaagtagctgggattacaggcacatgccatcaggcccagccaattttttttgtatttttggtagagacggagtttcaccatgttggccagcctggtcttgaatttctgatctcaagtgatccacccgccttggcctcccaaagtgctgggattacaggcgttagccacagcgctcagcccattttatggatttcttatagccccagttataggtgcactcagggcattaaaaagggaaaattgggccaggcgtgttggctcaggcctataatcccaacacttttggaggccgaggacaggagtctcgaggactcctgtcacttgaggacaggagtttgagagcagcctggccaacatggtaaagccccatctttactaaaaaaaaatacaaaaattagctgggcgtggtggcaggcacctgtaatcccagctacttgggaggcagaggcaggagaattgcttaaacctgggagggagaggttgcagtgatctgagatagtgccactgcactacagcctgggaaacagtgagactccatctcaaaaaaaaaaaaaaaaaaaagaagggaaaattggccaggtgtgatggcttacccctataatcccagtgctttaggaggctgaggcaggaggattatatgaggcaaagaattcaagattagcctggataacatagtgagaccccatctccataaaaaaatcttaaaaagtcagctgggtgtggtggggcacacctgtagtccctgcttaaagggactgtagttgaggtgggagaatagcttgagccaaggagttcgaggctgcagtgagctatgatcatgccactgcacaccagcctgagtgacagagtgaaaccctatccccccctcccaccaccccgtcaaaaaaagggaaaaccatcaatctcggggaaggagaatctgatttttaaaaagcctcatttaagactcgttggactagaacactgacctcgttttcatgtctgactcaaagcagcacctgtgggtccccccatccttacaagtggtttgggaagactcccattttacctctaacaggcatgggcttgctgcggtttctctctgcctgtggtttgccctttaacccagcaggctacaaagatgaaaagcaaacacaacgttaaagaaaagagctagggaagagggcagggggaaacagggcagaatttccttgcagccctgacatcttgccttgtttctgtgcccatccccttgtctggttacacagtcccttccagagctgccttgcttgggggctgtgctcagtcttgagacttttaggccagatgactcttgagttttgctttgatgttgtaatttctttgaagagaaatcttaattttaggcaaaaaggacattggagaacggattctttaaaattaaattaccatctttcgaagtgaagttttaacccttctcaagataaggggttgtccctgaaatttctgcttgcttctgctgatgatgctagtgggaagtcaggattggcaggaccccatcttgtgaaaccaataccgtaaatcctcagggcaataaattcagctctgaagaagtgtcagactcttatgggtagggattatgtggaatgaagtacataatttgtattagtgtaatagtaaagttagaggaatttgcctcctgctcttattgagataacatcggcatggttcctacagggataggaagcccagccaagaaaggcaaaggcttaggaggaagctattggccatgtacaaagcctgcagtgtcattcaccctgggattcaaaggtatcacattgaaaataaattgtctagaatggagctgagttatcagtgagtagttaaaaataatcaaagctaccatttcctgaattctaacaacatactaggaagtaagtgctttatttattaatttagttagtcatcataacaatcccatgaaggaggtagaatcattatctctactttatagatcaggcatggagctttaagtaagttgcccaaaattatattgcttagaaaaggcaggtgggggatttgaactcaggtaggctatgggggccccgcactttccactatgctgtactgtagtctgcttctaggacaaaccaagcatgctcttacctcaggacctttgcactcactattcccactgcctgggaggtttttcctttagatattgtcatagctttatctcttacctctgtgcttaaatgttaccttgtctgggaggccctctctgaccaccctgtctaaaatagcatccctcctgtcatcactctctctccttaacctgctttattttcctttcctaggtcttctcatgccttgacatattatttatttgttgtcttgtctgtccccacctttagaaggtaacctatgtgaaaacaggagtgtgtttaatttgctgctatgtgcccacctccctgaacagtgcccaggacagggtaggcgctaataaatgtttgttgagtgaatgaatgaagtaaactaaaactgctgatcaaggcctgccaccctggtttcagaacaaaataatttgtcccttgtgccagatctcatcagactacccaccaccagaaagtgagtgtccatgcagggcctggttgatgtctacagtggcttagtaataggcacagtccctatcttttttttgaaagtcagctgtttctggaggatctcttgtttgtagtagttaagagcatgggcgtggaattagacagacctaggtttaagtcctggtgccaggatttataagctggtgacttggggttgcttagcatcttttttttttttttggtgacagagcagagtcccactctgttgcccaggctggagtgcagtggtgccattgtagctcacttgcagccttgaacttctgggctcaagtgatccccctgcctcagccttccaagtagctaggactattggcatgcgccaccatgcctggctaatatttgtgtttgtatttatttatttatttattttcagaaactcctgatattcaaattatttttattttttctatgtttcccaggctggtcatgaactcctggcttcaagggagcctttggcctctgcctcccaaagtgctgggattataggtgtgaaccactgtacccagccttacttagcatcttgaagcctcacctttctcactacaaaatggagtaaagggcatctgtctccttgtattgttgagaagattaaatgggaaattgtgatatacatgataggtgttcagtagatgataacagacattttgtgggttcagaagaaagcagagatgtcagcttctgacaggaaggggaataaggtatagacacttgatcaaccacagaataattacaaagcagcatgtggacaagtcttggctttgtaactaagtagctgtgtaaagctgggccagtcgttgagcctttctaatttttggtttgctaatctgtaaaattaaagggtcggagtagatactacctgttctagcattccaaattggctctgactagaagataacatggaacaaattatacacaaaatgataagtgacagaatgttcacagtaggatgggattaatcagaagtctcttttggaatgaggtgaggactattggtagagttcttggactttgaggaatagcataaagatggcagattgtgataaaatggttagatctgacaaaattcaggttttttgtgtgcttacattgttgggaagatactgcatttaaataatttttgtttacgtaagttatatattaaaatagctaatgtagtattaatattctgtttattcttatgttgccaagttgaatatttttcttggataacacttttctgttttgtgaagttattcctgctagcctttacataattatgcatttcagatttccacaagtgtgtttgaagtctcattttctagaagggattcaggattattagtccatgtaatgacaattatagtatgatatagaataaaagattttcttgtttaatttcttcatattagaaatgagggaagtaggatgcagaaggtctgagctggtaaaacatgctgatggtcgcactcctgcctccttttcctttgaggatgcctgaggttcttatacataactcttgttattgagaaatgttctaatttatcatcctgctgtactattttttcttttttcttttgtttgagacggagtctcgctctgttgcctaggctggaatgcagtggcgtgatctcagctcactgtaacctctgcctgccgagttcaagcggttctcctgcctcagcctcccgagtagctgagattacaggcatgtgccactacacctggctaattctgtatttcttgtagagatgtgatttcaccatgttggccaggttggtctggaactcctgacctcaagtgatctgcccaccttggcctaccaaagtgctgtgattacaggtgtgagctaccactcccggcctgtactatttttattgtagtgtgcacagtagtatttatacctgtagtccactgtggtaccctcattagatgcccgctgtcagccaagtgtaggtagactgtgatccgccttgctggaattaagacagtgggaaagccatacttggaaggaaataattacataataattacaacctgaagggttgtactgcgttctaggtgtccaagtttaacttggtccaagggaatcagaggaggcttccttcaagaagtaaggcttttgctgagacctgaagatgttagaaagtgaccatcctagggaccatggagggatgttgagttccgatatagtgaacatcacttttggaaggtgaggacttggcccttttgtgggactgaattgacactagtgtggctggagtgtgcagaagatgagcttggactaactagacgatggttggtggccatgtgaagttttgctgtttatctggacggcagtgggcaaccattgaagagttttaattcttagtgtttcacatgcctgggctctaaaccaccacacctggtgcacttttaaattttttgtagagacagcgtttcactatgttgtccaggctatcaaaagcttttttcaatggccaggtgcttgctagggcctgagggaggatgactgttgtcctgagaatattctgatatgctgaattttgctcgaataattacagctttatgatttaaacctttttgatgacagctgattcctcattctaggtagcttggttggtttggtggcagtgccagaccaagttccacagcccccagctgaacccctgcagctaattgggaatcatcaaatagaatcgagaagggccctgcagccagatccctgtaacttataccagaaatgttgaggcaatggcttcaccaccatttggacagttttgctacattatgagtatctttagaacccataccttgtatggaatttggaatcatttttttgtgatggagggaatttttgaaattctagatgataaagtctaatctcaaaaataatacaaaatttgctataaacaactatttctgttgccttgctactagtagtttgcttattttctttttggaagtctaggtatattttaaccataaaaataccaatgactattatttatttaaaatagacagtgtggggccgagcacagtggttcacacctgtaatcccagcacattgtgaggctgaggtgggttgatcacctgaggtcaggagctcgagaccagctgggccaacatggcgaaaccctgtctctactaaaaatacaaaaattagccaggcgtggtggcacatgcctgtaatcctggctatttgggaggctgagacaagagaattgcttgaacccaaaggcagaggttgcagtgagctgacatcgtgccactgcactccagcctgggtggcagagtgagactccatctcaaaaaagaaagaataaaataaaatagactgtgtgggccaggtattgttttaggtaccatgcctatattctgtcttatattataatcaaaatattgctaccattttacagatgagggcgtggtaggggctaaatgacttttccaatgtaacacagctgggtaagccaggttttgaacccccaaatacagttctttattaattctagcttaaaagcagacacccttataaatgaaaaggtacagaaacctttggatgcaaaaatcttaaatgtgaaaaggtggttcttagagtattgcaagggtgggtgaaaaagccatcctagtttgtgagtttgaataaaacatggtcttttccaactttgtgaaatgtgtcaacacccaccctccctttttcctgtattttccttgggagtgaggtgtgttgtgcttgggatagatggaagggctcttaaggacggactgaagttcggccccaaggaaaccaaggctgctggggccagatttgttgatcatgctcccagccaggaatgagggtgggcctgctctggagggacagcccaccttgcctctgaaggcagccggcacagaacaggcagagtggagtcaggcttctctgctctcctcgtaccatctgtgcgtactgcttcccccgtgcctaccagtacaggtggttccagagtaatcttcctcctttcttttcctgccactggcagccacagaatgttgggactaattaatctgatacctcaggataataaatctctttggtagaaacagcttgctaatgataaatgatagttttaatactatacatgcacaatctcatttgattcttgcaacaactctgtgatgtagctaagttttgtctgttacactctttacaaaggaggaaactgaggctccattctgatctaaacctccatcctttcttgtctgacatgctgtgagaatctcaactgattgtccaggcagtctggcctcccttcagtctgttctctgtacagcgtgagggaaatctttagtaatcccatctgatcacgctattccctgtttaaacccctccttgaacttattcctcttctctttccctttcagctctgcagctctcctccctcctgtaatgcttcctctgcctgcagtgtcattcatcacctgacttttaaaatcttcgcttatcctcaggttgcgtatacttttcctttagagctctgattatatcgtgtagttacatgtttgtgattattgtctgtttatctcaccagcttttaagcccacaagggcaaaaaacatgtctccttggccactgcttagcagagtaagcaataaagatttgttgaaaggagaaactcaggaaattaaatgtcttgtgagaagtagtaaatgatatttttactcggatataagctccctgagggcaggatttttggcgtctttttttcattgctatatccctggcatcttgaacagtgcctggcatatagcagtaatatttattgaatatcagttgtgcttggatgtgattccgaagatttcttatccaaatctaggactttttctctcattgtgccaaatctatctgaagatggggattagtttagttctgattctgaatcaactcatggatgtagccaggccatgttagccatctaaggggaagctactaattttttcttactggtttttagcctattgccagacatccattttgccacagtttttctcttagatagagcaagatttctctcctcaccttagggaatattgtacccaaccagatccttttgaatattggtttagaacgtgatggttttgaggattcatttggatgggattttttcagctaatcttggtctttacctgtgcactctgttgggtcatgagggcatgtggggcagtatgctcagtttaatggactcagaaataaacccaggggatctctgaaattagcagaattagcagcacatttgtttgctttttttttaaacccattaagttctaagaattttctttttttttttttttttgggagacgtagtctcgctctgtcacccaggctggagtgcagtggcgcgatctcagctcactgcaagctccgcctcctgggttcacgccattcttctgtctcagcctcccgagtagctgggactacaggtgcctgccaccgcgcccggctaattttttgtattttaagtagaaacggggtttcaccatgttagccaagatggtctcgatctcctgacctcgtgatccacccgcctcggcctcccaaagtgctgggattacaggcgtgagccaccgcgcccggccaagttctcagaattttcttatgttcattgatgaatactaagtgttcttcagttcatcaaagttcacctaccttttaaatggaacatgttgctttgaaatgtggggaaaatgactattattccaaattgctctttcatgatctcagagtaccctatttatatttctactttttttttaaataaatactttaagttctagggtacatgtgcacaatgtgcaggtttgttacataggtatacattaggtatacatgtgccatgttggtttgctgaaaccattaactcatcatttacattaggtatttctactttttttttttttttaagtgaaagcaagtttattaagaaagtaaaggaataaaggaatggctactccatagacagaacctatatttctttctttctttttttctttttttttttttttttgagatggagtctcactctgttgtccaggctggagtgcagtggcataatctcggctcattgcaatttccctctcctgggttcaagtgattctcctgcctcagcctcccgagtagctgggattacaggcacgtaccaccacgcctggctaacttttgtatttttggttgagctggagtttcgccaggttggccaggctggtcttgaactcctgacctcaggtgttctgcccagctcggcctcccaaagtgctgggattacaggcatgagccactgtgcccagccagaacccatatttctaaagaaagcatttagttcataaagtccagagattctttgaggtcaaaaagtcaggattgggagtccctgatgtttgcagtcagtgtggtagaacctcacagaagaaagaggagtttgtatttcgttagttttatcaaagctacaacttttcggaagccttcagtccatccagcattccagggaactgattcctaagtcgggtgttaaggcactgaggtgtacaagttgtggccaaaactggagttcagctgaatgagaatgacacacttcccttttgcttctcctctgccttgggaatctttcaccacactggggagattagacaaaaaccttctgcagtttattttctttttgaacagttacattatggagagacttttaagctaaaagaagaaaagctccctttttgttacaaacagcagtgtgtagtttcaacttgtccaggacttcctcagagatgttttaagatccggtgtaaacttgctgtggtttgcctttgggcatcaaactgtttagcttggctctattatatctgtaattgctgcattttaataattgcccaatattcttgtcagcaatttgcagcctatatttttaatggaaccatttgcctttcttttccacaggtttgttcagacctggcttaagcccctggattaacgcagcacagaccctcagacccactgcagctgtgggcagggtgacgcaagctcattaaatattcccacaagcctcgtgccgcttacagtttatgtgcttcataaaatcctctgggaagtcatcttcttctgagatctccttacagggatttgctttataaaagttgtctttaacatttgctgaaatagcatattgtttcagagaggtttttccttatcaaaattattatataggcaggaggcactatagttcttgtgaaccaattcactaatttagggaatctaatatttcgaagggaaaaaaatagagacagatcctctttgtggtggttgaatttttaagttaacggagaagatttccatatgatcagagttgatgtggaattatggtgacagaaatgttcgacttagagggataataagtcagtttaatggctcccaaattatctctataatttagtcagcttttgagacaagaccgttgtgtcattgatgacttatgcctcaacttgactggtaattttgttcttttagtgagtccactctttagcttatctccttttgactgttgtaatgtttatttttcagtaaacaaaagattgaactggatttacagtagctaagaattacataaatagctatatcttaatttctccactttattggtataaatagctcaaagagaatggacaagtagtgatacagtacagtaattgtagctaacatttatttggttggttgttacgtgctagggactgttctaagcattgtgtatgtatattaactaactgaatcctcacaacagcctaccatacatttcctaccacaggatatgttcattcaagaagagtaagctgcctaacattaccatttggtaaggggcagagtggattcacacccaggcagatttttaatctttatcataatccgtatgctattcatactaggattttaatcactatcgtatatcaagattgaaccatagtggcctcctgcctatataataatttagtttcaagacatatctaagaaattctttttgaaattggaactttactgttattatttctggataggtaatacttgcacatggtattaatacaaaacccagaagggaattcagtgaaaagcttctgctccctcccacccctgtcctgcagtcaccctatttcccccgttctcataggtaaagttacaattgcaaagagccattttaaatatctctctttgtcacttgatgcaataaattaagaccatttaattaaaaactcatttaaaataattttttttgtactgttatctacaagcgcccacattggctttgtctctgaaggtagctatgggcaactcctgttgcgtgatatttcctgagtgaggatgacaaggccacaacccccaggtgtgtgagatggctcccggaaatgccaccattctgccttttccagggcttagatcagggagggtctttgcacttttacccataacttttattcttgatgagaaggaaccatgcctggagcatagtaaatgctcagtacatgtttgttaattgaacttctgtgagttgtgccaggctcagggatagagggctggagaaatatactttggagtgtctaaatcagtgaccattagggccgtgtgaggaatattcaagttaggcaaaccaccacaaaactctcattgaagactctggataggaaaagcttagaaagaaccttctagatccttgagtccagtaaccagatagtctcagatgggctgagagacagggaagacttttttcctgttaaaatgttggcaaacagttgaaataagaaccttgcctttttatgtttctttatttttttcagattgattcctagcacaacttaatttgatccttgtgataaccctgttattataacattagattgagtctctaatcagtgctggttttgttttcttgctggcactagggttgcatgtatcaagtgtcattgattactttggtaccacaacttaactggtggtgttatatttcaggtgcaccttgattttcttctgtagttctgaaaattctctataaaaccaaagatttaaaatgtcaaaaacagggccgggcgtggtggctcacgcctgtaatcccagcactttgggaggctgaggtgggcagatcacgaggtcaggagttcaagaccagcctggccaacatggtgaaaccccatctctactaaaaatacaaaaattagccaggcgtagtggcgcatgtctgtaatcccagctacttgggaggctgaggcaggagaatcgcttgaacccaggaggcggaggttgcagtgagccaagactgcgccactgtgctccagcttggcgacagagagagactctatctcaaaaaaaaaaaaaaaaagccaataacaaatatgtcatttgcaaaagtatttgctataaaaatctttattagatagtcactgccctcagtctagtttgcttgagtgctattttgcatcttttaagataaatttcttacattacgcttttcagaaattctctgtttaattttagtgtctgtttgtttatgaagtttcttcattaagttttcttattgaaatttgttttacaggcagtttgaaaattgcaaggagggactttaagactacttctgatttgcaaagattgtctgtgctctgagcaggctgaagtgactggacgagacgcactgttggagaaataaaaatgacttcccattatgtgattgccatctttgccctgatgagctcctgtttagccactgcaggtaagttgcataatataaattgcatatttgttatatatttttggatatattttgtcccagtctctttagttgagatgaagtttcactctgttacccaggctggagtgcagaggcataatcatggcttactgtaggctctacctcctgggcttaagcgatcctcccacctcagcctcctaactagttgggactacaggcgtgtgccaccatgcccagctaatgttttattttttgtagagatagggtttcctatgttgctcaggctggtttcaaactcctgacctcaagtgatcctctcttcttggcctcctagcatgctggtattacaggtatgtgccactgtgcctgacctgtatttacatttttgtccctgaataaggatttcaagaaagcatttttgtcctttattagcaaataaatagatcttctagattgaggtgacactcttgacataggctgcttgggaggtatttagttttgcctatttcacatatttcaatatgtaaccttttttttttttttttttttttttttttgtggagacagagtcttgctctgtcacccaggctggagtgcaatggcctgatctcggctcactgcaacctcctcctcttgggttcaagcaattctcgtgcctcagcctcccaagtagctgggactgcagatgcctgccactacacgtggataatatttgtatttttaatagagacagggtttcaccattttggccatgctggtcttgaactcctgacctcaggtgatccgcctaccttggtctcccaaagtgctgggattactaactttttaaaaagtagagaaatacactgagcttcctggaggccaaatgagattggagatgaaaagatgcaaatgacttggaacattgttgcttaactaagagtatcggatctcccacaccaccatcttagtgtgtttactgtgaggggttacttagtaaatttggaagcttaatttgctctattttattataatttccattgtgtctattctgtaatgagctacataaaactaatttgttggaccagttctggaaactggcaggtctcagcaagaaaagcattgactcgaaaagtgattagctgcttggttttggctgttgaattgcacatacagatgagagtgatagtaatgatcatctattgagtgggcactatatccaggcactgggctaaacaattaaagaatataaaaatgaataaggatattcttatttaatgagctcacttaatcacaacttggaggtagaattaatttggcattttataaatgatgaaatgagatatggagagattaggtaacttgcgtagtgtcatgtagctggaaagtggaagagccagattttacattcagattttacatctatgctcttcacctctgtgttatactgaagaaaccagatctcccttaagactccaatagactcagatctggggttgtgtgcagacgtagactaagcgagagtcagctggcagaaactggtttatggattggaaagtagaatgttcctctcattgcaagtatctttttttttttttttttttgagatggagtctccctctgttgcccaggctggagtgcactggtgtgatctcggctcactgcaacctctgtctcctgggttcaagcgattctcctgcctcagccttccgagtagctgggactacaggcgtgtgccaccatgcctggctaattttttgtatttttagtagagacaaggtttcaccatgttagccaggctggtctcgatctcctggcctcagcctcccaaagtgctgggattacaggcgtgagccacttcccctggctataaatatcttgaaagaaagttgctaggccttttttgttgttgttgttttttgaatgccagtttatgaatttcaactgcccattctctatttttgtctatcagcagtttcattttgtctcattattgaagtgctatttgccttttagcctgtgtattaaaatggaattgacttaaaatctcatcgaaaagtagtagaaatgcacccccccacccccacctcccaaaaaaaaagagagagagaaagagggagagaagcggcttgatggaaaacatgctgttttgatgacaagatgtctagtctcaccttgtgggtttgaggctgggctttctgccttcattgatgcctgggtcagactgaaaaacacaactgaagaaggcactttatgggaaaggagtgagttcaatggccctgtccagccttgatgaatttgatagtgaatcagttttgcttcagatcttcctttcctatttgaagcctttgggaaaatatacacacaagtatatatatatttgagttgaatacacactcaaggctttgctgaggtggaagggacagtagagttacagattttttttttttttttgatacagagtctcgctctgtgtgtcacccaggctggagtgcagtggtgccatctcggctcactgcaacctctgcctcctggttcaagcgattctcctgcctcagcctcctgagtagctgggattacaggcatgcaccaccatatccagctaatttttgtatttttggtagagatggggttttgtcatgttggccaggctggtctcgaactcctgacctcaagtgatccacccccttcagcctctgaaaacgctgggattacaggtgtgagccaccaccgctggatgaattacagattttataatagcatgaggcaactgataaatagcacagaggtatggatgcctttttggtgtagaagtttgttggttgtttcccttttgcacaacataatagatcaaatgaatgaagaagagggaaattttgtttttttttttttttttttttttgagacagagtctcactcgccccggctacagtgcagtggcacaatcttggctcattgtaacctccatctcctgggttcaagcaattctcctgcctcaacctcccgagtagatgggagtacaggcacacgctgccacgcccagctaattttttgtattttagtagagatggggtttcatcgtgttgcccaggctggtcgtgaactcctgagctcaggcaatccgcctgcctcggcctcccaaagtgctgggattacaggtgtgagccactgtgcctggctgcaaaaaaaattttttatatgctaatatctgatatttttctctgtaggcccagcatactttacaaaatggttttttgggcattctggatgagctgaatttagctcatctgggtagttataacaatgatgaatatttcaaataattactgtgtgtcaggccccaaatttctttacatgtattatctcatttcatcctcataaatactctaagaaatatagatactttaataatccatagtttataagtgaggaaatggaagcacagagaggtcaaataactttcttaaggtcacacagctaataaatggcaggtggaactataaacctacttagtccaggtctggagattgagcctttaggcctctctactatattgatttgaaggaaatcatttgtttggaaagaatggtaataggttttgagccatttatgtcctcctgaaacattaaatcatttattcactgatccctgctgagtacaaagcacagtagtagtcacttagggatatacatgcaaagaaatgtaagattcgttcccaccctattttttttatttttggagagatgggatcttgctgtgttgtccaggttgaccttgaactcttgacctcaagtgatcctcccacctcagcctctcaaagcactgggattaaaggcgtgagccactgtgcccagccatattcatcccttcttttgagttgcttgtactttatttaggcttataaaatataaccatataaccaaataatgaatgtgtagtgaaagccaagtaaaacccaaagacctcagaggggtcacgaggggaagccctgtgggtcagagtagccagggacagctatgtggaagctctagatcttgaactctgtcttgaagactgggcagaatctaggaagaaggaggcactgagttcaccaggtgggaaaacctggcctagcacggaatgtggcatttaggtgcttaatttttttttttttttaaataaatggatgacctggagagctggtgtggaaatgtagcaggaggtctatttggaaagaaggatggagtagattatgaaagttcttaaatatcataatgaggcttgtggattttattctgtggtttggatgctctcttcttccatcccttggagccaaaggcatgcactgtttaatcttggaattcaaacggtggcctcaaacagtgaggctgagtatgtggcctcattagcttcagacccagcagtgcttggctcacaggctgtcatttatcaagggcttgatctctgccagctaatttatttaagacaactctatgagatgggtattattattatcatcacctccattttacaaacaaggaaattgagactcagtttggttaataatttgtacaaagtcctggaactaataagtggcagagttgagacttgaacctggcagtttggctctagaatccagcccatcaaccactagatccttctctagggaggagaccctgtgtgtgggatgaataaacctcttcttgattgattaaataccaggtgagtagctaccagtgtgacatcctggaaccagattaagcccctttggcctcagaagagacagacacaggtcatcagagcagaaggaccctcaagtagtgggccttctttattcatattctgacttaaccaaagtggccttaaagctgtaaatcggtgggaaggtgtggaggtctggcagcagaggggtgaaggttgtcaaaggcctccttttggttatgtggccagaggaggggcagagcacaagggagcacgtaaattgagcccaagttagaataataggagcctgcttgttccagctccataggtttgtctgggccttcagtgaaaacctttctttccttctctgcttgtgatagagagtgaatgaaggcagtcggggccgggtgggtcgggggatatccatgtcccagtgttagtgttgttctgacaaaactcatgctttcggctgggcgtggtggctcacgcctgtaatcccagcactttgggaggccgaggcgggcagattacgaggtcaggagattgagaccatcctggctaacacggtgaaaccccgtctctactaaaagtacaaaaacaaaattagccacgcgcggtggcggacgcctgtagtcccagctactggggaggctgaggcagaagaatggtgtgaacccgggaggcggagcttgcagtgagctgagatcgcgccactgcactccagcctgggcgacagagccaaactccgtctcaaaaaacaaaaaactcatgctttccctcccctccctcgttccttcgttatcatatagcactgttgaggatggagggtggactgtgctcttggtgaacacgagctgtgtaaggaccataatgcctcttgattagaaattagcttaggtgatttacttgggttaaaaaaaaaagagagagaataaatacaagagatttattggggttaaaaacaaaaaagaaaaaaaaagaaattatctaaggttatttattggcctcttagatcctgtaagctacctaatgtaagaaaagtgggaagtttaaaaaataagtgcttgatactatgggcttaagtctaagttttgctttaaaaactcgtctatacttgtgttataacattactattattgaaaatatctgctttccaggctgaagtgattcatttattattctagttctgctttcctcctttgtaatttgtgataattgtgcttttctttttaatacaaaaaatggataaaaataaaaacttgaaaaggcaaaaacaaaaacaaaaacaaaacaacctcccaactgttctacacatctttaaaagatattagctgctgcctctgaggcttgccaacattaggcagggctatgtttccaggagttttagtaataagaaaaagaggcatgcatggagaattcagggaaatcagttttattggaagggctggagttatcactggccccttgtgccaggtgagaggggtgccgctgaggtgagctctggagcagggctgctggcattgatgccagtgggctcttggtggaatggctaacttcttcattccactgtctcaattcagtacccagatgtatccttttggaaactcgcctgcaaactgtgcacagatttctattgagaaacacatttcttttcctctctactggatgtacctggaattccaggtagagtccacaggaaaatcgagatgcttttagtctgagctattttcctgctcagaaagctctgaactctttgtgtctgtgggagagcaagctgagataccagctggttaatacttggtctggaatggtacaagctggcagccttgagtagaggctaataataccatattgtatttgtaatcttaaaaatgtttttataacaggtatttcatttgatcctcacagcagcctctgggggtaggcaggcactattttcttcatttctagaatgagaataatagggcttagagaaagtaagtgatttagaaagataattcaagtcttggttggaccagaacttagacatgcttttgcagacaaactgcaccaacaaatcctgtgacctttttggtatagtgcacccttagcacctcttgacaaataaaaattgtatatatttatggtgtacatcatgatgtttttatacatgtctacattgtggtgagtaaatcaagctttttaacatatgcataacctcacacacttatcattttttgtggtgagaacacttaaaatatactctcttaacaattttcatgtgtaaaatatattattttttttcacatttttatagggggctgtaggaagggggcctcctcactgtcgagtgaggtggtcacagtttctttggcagctccaagctgggcactgggggtcctggaggtggctctgtatgtcagcatgttcctaccaccttggaagggcactagatagtttcagggcgtcacctggttggtcatgatgttgtacttggtaggggctgagtattggcccccatggtgaaggacatgactggcaccagctccatggcccaggcatttttgaggaaggcatgagtcctagaggggtaggtgagtgggggtcacctctacaggggtcatggccatcttaggctcagtggtggcagtggctactataataccttgttattaactatagtcaccatggtgtacagtcaatctcttgaacttattcctcctgtctaattgaaattttgtatatttgaccaacatctcctcagtccttccacccccactccccagcctctggtaaccaccattttactgtttctatgagtttgactttttttctgggagggggtgggatggagtctcactgtgtcacccaggctggagtgcagtagcatgatctcagctcactgcaacctccgcctcccgggttcgagtgattctcctgccttggcctcctgactgggactacaggcatgcgccgccacacctggccaatttttgttatttttagtagagatggggtttcaccatattggccacgctggtctcgaactcctgaccttgtgatctgcccgccttggcctccaaaagttctgggattacaggcctgagccaccgctcccggccatgagtttggctttttaagattccgcatataagtttgatcatatatgatatttgtcgctctgtgcctggcttatttctctgagcataatgtcctccatgttcatctgtgttgttgcaaatgacaggatttccttcttttttaaggctgtatagtattccactgtgtatatataccacattttcattattcaatttattcatttatcctgtacttgaaagagaaatcttggatgtgagttaacggcctgtgaacctcagaggtggttctgccatagttatctcctgtctgccaaacgagtgatcaaaggctgtaatactcataagggcaggaaggctggagggtgctggcaggggactaccaccagggaatgtaaggatagaagatggataggctcaaaggttcaaagcaaactgaaaaaaagccccctcccctttttttcttcttcttctttttttttttttttttttttttgccaaccctcaggtcttagaacacagctagttgatttggtctgtgattattattgtttttagctgattattttatcttatttttattttatttgtttttttgagacagggtctcactctgttgcctgggctggagtgcagtggcgcgatcatggctcactgcagcctcgacctcccaggttcaagccattttccccccacagacccccaagtagctgggactacgggtgcacgccgctatgcctggctaatttttgtgttttttttctgtagagatggggttccgccatgttgcccaggctggtttggaactcttgagctcaagtggtccacccatatcggcctcccaaagtgctaggattataggtgtgagccatcatgcctggcctttagctggttattttaaccagttttgtgtttaattctgctttttgatacacaaggaaaggatattgtcaaatgtgataccagttatcaccagagtgccaaactttattttaaagagcaaataactgctattaaaagacctagagtggcatggtggtggctgcctgtaatcccagctactcgagaggctgaggcaggagaaccacttgaacctgggaggcggaggttgcggtgagccgagatggcgccactgcactccagcctgggcaacaagagcgaaactaggtctcaaaaataaaagaaagacccagagtggatagggtagcctgcattttagagtgtattccctttgaggatattgtgcacagccaagtgtgatgaagcacctccccacctaccttctccattagatttttctacagaaacagcatgtgcgtgcatgcgtgtgcaaacacaacacacacatgcatgcgcacacacacacatacacacacacgggagttgaggcagtagttgagagaaaggtgagttcatttctcaaagattcccttgccctgtatggacctgtgtgtgtgtggaggtggggtggatagcctaatgcaaggccttttactttttttttttccctgagacagggtctcactctgttgcccaggctggagtgcagtggcacggtagctcactgcagccttggcctcctgggctcaaacgatcctcccacctcagcctcttgagtagctggaactacaggcacatgccaccacacctggctaagttttgtattttttgtagagacaaggtttcgccatgttttccaagctggtctcaaactcttgagctaagcaatccacctgccttggcctcccaaagtgctaggattacaggcgtgagccactgtacctggccctttttatcattttcaaggagagtttactaatagctagttgggcaactgaatgtgcatatagtggaggggaggatgtttaccaagaatgagtaagattattgctagatgtgatgttagccaagtcaagagaatcgaggtttctctttgctttgcatccttatcgtaggctgtataattgccacccagctttctggatttctgattgatttgggttattttaggacagcagtgatggtgtgttttacagtgatcaacacttccatcaagacacagctttatctgtatgtgcctacacagctctttaattgctaaaagcttacccttgcacacggttgtgtatataggaaattagactttctcagcttgtttgctttggtaattaatccaactctggaggtatctttatcaccccatagagcttcgagctctgagcacgctgattttggaagtgatgtaggagcagggagtgttctgggaagtgttccgggaagcgtgccagcaagaggccttcctttaggactgaccctgctcagcaccgaggcgcatgattggcccatcccgcaccacatccatggcagccactgactttcattttctttaaaacgatctctgccagaatggcctaaaaaacatttatcctgaacttcaatctagtcatatttttgttttctgagagggcactgtcaatcaggtggaattctagagggctgaaaaatgccatagctcttggaacgttccttccaaggagtaggcagcaggtgctctggggactgaagcccagctattcccctgccctcccttgccagctcttaaacatctttaaaaaaatctacagtgtaatgtggaaaattttactaccttcaaagggaaatgttgatttaaaaaattattttaaagttactctgtttgttggcaatgaggggaaccatatatggcaaaaggaaaaggtcttgataaaattgctctgtgttctttgttttgcttccttttgtcctcatatgcctgagtaactgcgtcctagtccagaagattgaccagggccatctgagtaacacctcccttccttcctactctcctactccacccatgaggatacacaggtagcataggcctcaaaggagggcagaggttcagcctctggagtcagcccctgctctgcattttttttttttttttttttttttttgagacagggtcttgctctgtcacccaggctggagtgcagtagtgcagtcttggctcactgcagcctcaacctcccaggctcaagagatcttcctgcctcagcctcctatgtaggtgggactacaggcacgtggcaccacacctggctaattttgtgatcttttatagagatgacatctcactgtgttgcctaggctggtctcaaacttctggcctcaagtgatctgcccaccttagcctcccaaagtgccaggattacaggcgtgagccaccacgcctggcctccctgctgtgttgttttcatcattgaccccgctggactgctacagcattttcctgtgatgaacttttccagtgggatgcacctgtgcatgacaattatgttgttaaattgctgaaagttaaagttataatactacatggtgaagcaaaatgctctatagctcctgcccgcccttatcttttccttttgagttaattagaggacagaaccacttattttgccttttctttatacttttaaataactactatgttttagatgaagacttgtagtctggtcaacgttaagtacctcctaagattcaggtactttgctagcttctgaggcacagaaaggggagagactttggggttagtgcaaataatgagttttttcatttttttctttttctttcttttttttttttttttttttttttgagatggagtcttgctctgttgcccaggctggagtgcagtgacgcgatctcagctcactgcaagctctgcctcccaggttcatgcattctcctgcctcagcctcccgagtagctgggactacaggcacccgccaccatgcccggctaattttttgtatttttagcagagacggggtttcaccgtgttagccaggatggtctcaatctcctgacctcgtgatcggcccgcctcggcctcccaaagtgctgggattacaggcgtgagccacctcgctggccttttcatttttttctaatacagttaactttcctaaagtgttgattgattgatttaacaaggatttactgagtacctattgtatttcagacactattccaagtgttggagagatagtagtaaacaaaacagataaaaatccttgtccttatgaagcatgtctctagtggagagagaccagaaacaaacaaaatgcatatatcagcaggttcgtcgaataaaaagcaaagaggttggggattgttagcggggattgcaatttgaagtaaggtgattaggaagggcttcactaggaacattgagcaaaggtttggaggaggtgagctaagtggatatctggggaaagagcattccaggcagcaggaaaagcaagtgcagaggccctgtggtggaagtttgcttgcagtgctcaggcaatagcaggtgggccaggtgcctgctggaatgggaagtcagagagttaactgaggggtgggagacggtgcgggtgtgtatagcccaaggcattgcaggccatcataaggttctcactctgaatgacactgagccattggagagtttgagcagaagaatgatatgatctgaaggatgtcttaacaggaccactctggctgctgggctgagaataggctgttgggcaaaggtggatttggagatactggcaagagaaaatgatgaccaggactccttattagaaggaaggacccttgggagtcatatgcttaggaaattcagaatgatgcttttgtaatttttccccaacctattccttttgaggaggaaagtggataaagatgtatttctcacatcagtggaatactgtgccatagcctaatattaaagataattacatctatagaactgaaaaagctgagtcttaaaacacaaaacaacctccccaaaccatctaaagaaaatctctttgtgttgtgaatgaatgtccttgaaaaatcatcgtcttaatagcctaaaccctcttttccttgcttacttaccctcctgatttccaagtcttgttcttttcatttctcagggggcctggttttcaggatcatgagttttgagggtcttaccaccttttgcagaagtgcttcttacagtgttgtaaattacagtttcgaagaaatacagttgcatccagttttacatagtaaatgtttctgagttgtaggtcaacctatttttataagttaaactacatattaaatgtgagcaaggagcatgatacaacagatttttttctataaagaaaataatcacttttaaatatattttataataaggatattcatagtggttttgccagaggtgagtggttttgccagaggtggaatataccatcttgtttatggaataggaagttttgcttttggagtttgaggttataaacaaatattaggccagtgctttcttatatgcatgagaatcacccagggatcttgttaaaatgcagattctgttttagtaggccttgatgggtcaaagactgtagatttttaacaggctcataagatgctgataccgttagtctgaggaccacatttgacagcataggtcatctgttttctcaatgcacaaattgtaacacagaaactgcaaacacctagacaatttcttagtgccataaaagggagcttgattttagcatgcctttacaacagctaccttgaacacctttggtaaacttgtttgggtcagagggatccatgtgctggagaggaagttggtttgaggcagtgagttccacagatgcctttagctctctgactgtaagtgtggtgcacctgcagaaaccaggtgcatctttattagctggggctacaccttgacataatcctaacagttgttaaagaaggaattcttcccgcccccaccatttcttccttttatgtgcctcttttgccttgtctcatttcttgccttgtgacttagtagaccaaggtaggagattcgtgttgggtcactgagggcggggtcattggtcccggaacctgtggccaagggactcttcggtaatgagaggtgatatgggctgagtggataaaagggggactttaggtgggttagcgagggtggctctggagttagggactaaaagttaaaagttgggtatacctcatttctgctagcagggctctaattttctagctcaggtttccccattgacttcctactttattctttttttttttttttttttgagatggagttttgctcttgttgcccaggctggagtgcaatggcgtgatctcggctcactgcaacctccgcctactgggttcaagcgattctcctgcctcagcctcccgagtagctgggattacaggcatgcactaccacgcctggctaattttgtatttttagtaggaatggggtttctccatgttgctcaggctggtctcgaactcccaacctcaggtgatctgcctgcctcatcctcccaaagtgctgggattacaggcatgagccaccgcgcccggccctactttattcttataatcacactccagtctagagcttttaaaaaattaacattttttagaagggaaaaatttctgtaagttgtaattgatgtttattaagcaccctgacaccacatttattataagtggggataagactgagaatatttaagctctgtgcctgaaaagttgtgttttaaactaacttttatttgtttacactgccattgagtagtttataaggttttctgatttgctttctctggcctcatcactgtttttggagaggcagcgtacaacctatgtacagctctggagctcgccgcaagactcaggtggtggtcattctgcttttgaaattgaaccagaaaagtcctgaggaatgtaacaatattttttctttttgcccccctgctagcttttttctagccctcccaaaaatgtgtttatgttgctgtccatgcatgtggagcagtctggaattctgtgtgacattagatagtgaaaaaaatagatttcccacgtgactgaggttataggagtgagaaatcttggattatgcaaggactctttgattggaagaaggacattttgagatgagatttattttaagatatagtaaaaaaaaacctagtatacaactttttgtttttttctaaactaacccttttcgggggtgacaggatggggtgtggactagaagcaataccaaacttttaagtatcaaatcttcactcagaagaaaaaaaatgtcttcagggtgaaagaatagctcaaatgcgaaaagcctgatagttatataatttgagagtagggtctggcatattatagaggactccgagagcctgatccaagcagcctgccattttcatcaccccaggattatctgtaaggacaactttactgtctgtcacctgccaggtctcagcctggcccttgtgagtgccaggaagtttgtgtcctctgttttgccaagcttaattagctctagaaataccctatcaaaggctgtctggcagtgttccattaatggtatggggtgaattcaaaagcactaattaattgttagattatttgcaaagcccatgctgaaaaacctaatgcctgcaggagaaagttggcagagagacggtacagagattagcttggaccttacccggctcaattgcgttttggaattgggccaagaggggagttgcttttctttttggagaagtgcttgtggctatattgttttctaaactgccagtgtactgctctaggctctccgtgagggagctcatatggacacttgcagacctagagagcccagagaccatcttcaagaggttttgtttatttttgttttgtgagagaaacacaattgtttaactttcattaactaaataaattcttcgcaagggcctcttcttaaatagaggaaaaggaactctagtttgtagtgtaacaattcaggttttaagtgttaaatgttcaaaggagccaggatcagggctttaaatagttttttcttcttaaaataaaacaagtcaggttcctcatgtcctctgtttaggtggcccaggtcagcaaaaagtgaattttccaactgctactgcagttggaagatgctgtttaaaaaaatcttcatttgaaatcaagtgcatgccaatttaaggtcagggtatactacatgcaggaaaggaagaaacaggtaaacaggtttgcattattttgctacatttgacatatagaatgataacacctataattaactcagcttgacaaattgtagacaaataatagaagtccctgtcccttatagatgagagagatttgaggcttttggagccaagtgccagtttctgttgactctgaaggcaacggagacagctgaagatcaaagtatagaaggatatttcagacttatctaaaagccaattgagtgttatataagggagctgtgtgtagctctgtttgaaaacatccatccagtaatcttccagttcctgagcctggccctgcctcctgttgacaggcctcagcgtctttttcttgtccttttgggcttgagcaacatgtgagtaagtacttatgtacaaatcccagaccaaatcttactttattaacatgattcagaagaaaagaattctaatgaaaaatttcagaggactgtgccgaaacatttcgtgatgttgtcagatctccctgaactcaggaaaggcccccaaaaatctattatttctgtttattactcaacttggaaaaagcttacaagaatgcctcaggagagtatgcactggttgaggaatttattcctgggtgtacagcatcccctacgtttactctgtgtgaggcgggctatcctgaaaccctgggcaacctgcctgctcctcagccagcaggtctagagtagcagcttagtatttttaaccctttctgtcatatgactcccagccaactttttgagttgatagaaacacagatctgagagctatgaggaattatgaaagcctttgtactgacaaaagactatgatttttctttgctgctttattatggttaaaaggtctcattatgcttttattttggagaggtaattctgtataacaagacctacttgtatatcccagttaggttgtgagatatcatgaataacattacaactgatagttaaattgaagactttaaatgattttcctcaaaaagataaaactaaattcaaggttattctaaaataagtatggttatttgcatttaaaaatatttcaaagggagaaagagaagttaggattacaagtgatagaatgaaaagtgctcataatttgttgcctgtagtatctgttttgctattcatgaacatggtacacccattcatttgtttaggttttccttaatttctttcagcactgcttttgtagttttcactagtttcttttgaagactctagtgtgtccaaatgtgaacaagattcatcatgtctgtcttattagaattatgtttaagaacctctgttttagagctgtaatgctatcctcttcaatctactcttcattaataatgatgaaaactgatactccctctgactttcctggagagtgagctcaggggtgtgtaactaaggctattgctaaagtgagttatcggcctggctgcctttgctctaagttgtaggaactcaaagctcagtgtgtactgtgagatatgttctttaaggctgaaggctagtgttgctgagcaagagatgtagtaaaatgaatatccttgttcctttggactaaatgtcagagttagaggcagtcttggaacccaaagattggatgttgtgcctttccatcaggccgttgggctttcccagcagagtttcgctggaacagagtcactccagtgaactttcattttggacttgtaacaaaaggattttgtagagattttaccctctgaatgtgggtaatacctgagggctttatcaagatgaagagtaactttgttgggttgctgcacctttatttagggaaagtaattctccaccacagtgtcaagagtggtcttgacagagacatatgaaaggtcagagagtcaggatcgtgcactagttgtgaccttgggttttggattcaggcacacaggttcaggtccagatcataggctgtgtgaccacaggctcagtgtcctcatttgtaaaattgaagtatcagtagttcctgtctcagttgtgttcttgtgaggattataaatgagataatgcatataaaccagaggatcacgtttattatgaatgaaactactggaaatagtattctttgaaaatgttaccatagtacttacctagtttggactgctataacaaagtcacatataagtcacacatagattgtatgtcttataaacaacagaaatgtatttttctcacagtgctggaggctgtaagtctgtgatcaagatgccagcatggttaggttctggaaagggccttttccaaattgcagactgatgacttttcattgtatcctcacatggatacagtcctcaaaaagacaaactagagagttctctggagtctcttttaagacactcataccattcatgagagcgctgtcctcatgacctaattgctccacctgttagcgtgccccatctcccaataccatcacactggggttaggattttaacatacaaattttaggggggtacacattcagtccgtaacacatggtggacatatttaatcagtcttttaagttgcagttctattattcaggcatatttttggtacaaaaattagatctgatcctgaaatataatgttgctgttaaacagactttattgatgcccagtttctttattttccgtaagttttacttagagcagtacagtggaaataccacagtggtacaatgggagtgatggagttgggagagggtgtggataagaagtgctctccctgccccccaactttttgttttgttttgttttggagatttgagtcccagttttgtggtttgcagagcttttgttgccttatctatacaatactgctaattatacctattcctttgatttgatgaggataaaatacttgtaaagcagccagaagtttatggcacatagtagttaggtcttcaaaaagttaatctttatttagacaatatatatgtgtaggaaaagagggggagagagagctagaacaaccttattatgggcagaatgcatttgctgtttagctttgtgctcccaatggagaaaaagcaggttggggaatgtccttgggagatggctgaggagctgttggctgagccaggtggatttgaactgagcacctggatggaaaagaccttgttttcttttgaggcagtgacttggtctttaactggaagttacagggtaaagatgaatgctcaagaacggtggcggtgctgaggatcaggaccagtgggggacaggagaacccaagtgaagtggattgaggctgtgtattggtagttttcctcatctatatggtacctctaggctcagtcccagtctaaccaccctacttaaaattgtaatccctctctaaccacagaaactcctattccttcttatcttgctctgtttttcctcgtagcacttctcacctcaaaagctgcttgtaatttacttatgtttattatttatcttcccccactaaaatgtaagctccgtgagagtcaagttagttttgcttttgctctggtgcagctttttcttttttcttttctttctttctttctttttttttttggcagagtcttgctctgtcacccaggctggagtgcaggggcacatttcttggctgactgcaaccttcggctcccagtctcaagtgatcctcttaccttagcctctcaagtagctggggccacaggtgcacaccaccatgcttggctaattttttgtattttttggtagagacggggttttgctctgttgcccaggctggtctcgaactcctgaactcaagcaatccacctgcctcccaaagtgttgtgattacaggtgtgagccactccacctggcctaaaactacttttttttttttttttttttgagatggagtcttgctctgttgcccaggctggagtgcagtggcgtgatctcagctcacagcaaccttcgcctcccaggttcaagtgattctcctgcctcaacctcctgagtagctgggattacaggcccacaccaccactcctggctaattttttgtatttttagcagagatggggtttcaccatgttggtcaggctggtcttgaactcctgacctcgtgatctgcccgccttggcctcccaaagtgctgggattacaggtgtaagccactgcgcctggccaactatttttataataattccaagattgggttaacactgctctaattgtataagagcaatattggataaaactgctggtgactcagcaggaatgaaggcagtacttcactggcacacacttgcagtaaaacatctgccactttcctttaagagtgttgttaccctcagatacatgttttttccttattctatatggtaaaatgggaggtacgtatgttgcatttctgcattccaaagtacaatgattttcttgaggaaaagcactgtgcagttgtttgagttgtgagctgatctggtctgtttttcatggaacaccatttgatgtgaaagagtgactgacagacaactgatggttatccagacttcagtatttggcagacatttttgaaaatgaacaaagtgagccgggcgcgggggctcacacctgtaatcccagcactttgggaggccaaggtgggccgatcacctgaggtccggagttcaagaccagcctggccaacatggtgaaacccagtctctactaaaaatacaaaaattagctgggtgtggtggcatgcacctgtagtctcagctactcaggaggctgaggcaggagaattgcttgaaccctggaggtggaggttgcagtgaactgagatggtgccattgcactccagcctgggcaacaagagtgaaactccatttcaaaaaaaaaaaagaaaatgaacaaagtgaacctgttagttcaaggaaaacaacagtatttgttgccaataataaaatttcgtttttcacacaagttaaaattttggaaaacttacatccattaccatgattatgacagtttctcaatggttaaatacttttctgatgaaatcagttgagatattaacaaatgtgatttttaaaatattatataatgaaatatgtcttatttggcagtaaaccattatttttcagatgaccaatgcatgatattacaaaatcatgcatgatattacaaaatcatgcatgatattacaaaatcatgcatgatattacaaaatcatgcatgatattacaaaatcatgcatgatattacaaaatcatgcatgatattacaaaatcatgcatgatattacaaaatcatgcatgatattacaaaatcatgcattggtaaaatattccacatcttgagagtacaagatagaacaattgattttttttttttttttgacagagtcttgctctgttgcccaggctggaatgcagtggcatggtctcggctcactgcaaactctgcctcccaggctcaagtgattctcctgcctcaggctcccaggaagctgggacttcaggtgcacgccaccatacccagttaatttttgtatttttttttttttttaaagtagagatgggatttcatcatgttggccaggctggtctggaactcttgacctcaggtgatccacctgcctgagcctcccaaagtgctgggattacaggcgtgagccaccgtgcctggccagagcaagtgatttttaaaaactttttattttgagataatttttgactgacagaagggttgcataagtagtacagcgtttctttaggcttatcactcagctttaccttatgaggacatcttacataaccaaagtacaatgatcaaaactaagaaattaatcttgttacaatattattaactaaagtataatatttattaggatttcaccagtttttctactaatgttctttttctggtccagaatccaacccaggatctcacattgcatttagtcgccttgtctccttagcctcctccaggctgacagttccctggtctttcaatgaccttgacgctttgggaactactggagaatgtccctcaattaatttttttcctgacattctctcaggattacattgaggttatgtgtcatttggaagaataccatagaggtgatgtcctcttttcagggcatcaaatcgaggatatgttatgttgataggaattattactagtgacgttaatcttggtcacttggctagagtgatgtctgccagaattctctggtgtaaaggtactatttttcactttgaaattacgcagtattttggggaaagcaaaggattttaatgttacggagtatgaaaaatttattatgtaattcagatgctaccttgcaactaaacttaagaaatgattatttgttgagtttaggtgtaatagtaaagaagaaataaccacaagtatataaaaagacttaagatttggctgggtgtggtggctcacacttgtaaattccagtactttcacggggtgaggtgggaagattgtttgagcccaggagtttgagaccaggctggtcaacacagcgagaccgtgtctctacgaaaaactaaaacattagccaggaatggtggtgtgtgcctgtggtcccagctgctcaggaggctgaggtgagaggatctcttgagcccggaaggtcaggactgcagtgagccatgttcatgccactgcactctagcctgggtgacagagtgagaccctgtctcaaaaacaaacaaacaaacataaaaaaacttaagatttgaaacttccaactgcatatactgtatctgtgtgaggccagatttcttcatatccttcaaccagaacaatgtattgcaaaaaattgaatgcaaaagtagatgggaaaacccagtggtcttgtattaagccagacatttaaagagatttgctgtgcatgtgtctttgaaatttaacaagaaaagagatttgcggccgggcgcggtggctcacgcctgtaatcccagcactttgggaggcagaggcgggtggatcatgaggtcaggagatcaagaccatcctggctaacgcggtgaaaccctgtctctactaaaaaatacaaaaaaaaaaaaaaaattagtcgggtgtgatgacgggtgcctgtagtcccagctacttgggaggctgaggcaggagaatggtgtgaacccgggaggcagagcttgcagtgcgccgagtttgccccactgcactccagcctgggcgacagggcgagactccgtctcaaaaaaaaaaaaaaaaaagagatttccaaaaatgtaaaacagtgctgctcatctcaccttacattttgttttagaaagtagttgtttttcatgaaagatactgtttatgttacagtttattatagttggtttttagtgaattaataaatatttaaaaatttcctcagttttaatttctattgcagaaaatgttaatagacttatattaacaaaatctctttggagtcctcagtaattttaaagcaataaagggatcctaacaacaaaaagtttcagaattgctttttttctgaataatacagaagagatatcttagtaggggaatcttttcttctggaccaaataaagatttaatgaaggactccaccaaggactcttggtccttgcagggaagtcactcaattatcagtgtactcagctggcagatgagggggattgccttgtactatctccaagtttctttaaaccccaaactacatgatttcaaatcactatcattgtcagcatgggcattatgcagcaatctcccgagtatgctatttgctaggttaaagatgaaggttatatgtaaggatataatgcagtagtatttgtgaagcagggactccagggacttttctttttgggcctgtaaaattatttctttcactgctcctttaaaagaatagaagttttcatgattattagattttactgtaatgagcaagggaaagatttttaattattgctgaaaatttttgtcaatttatgtatatcacaaatttaaaaatgcatgatttctgagaatttttctgctctaatgtatatgtgtaaacttatgtgaatatttgtaagtatttacataaatcatttaaatttgttaatgggttctaaatataccactgatgtctctgttgaagtagactcgggttgcatatccattatatccttacttaccagccgggcatggtggctcacacatgtaatcccagcactttgagaggctgaagtggatcatgaggtcaggagtttgagaccagcctggccaacatggtgaaaccccgtctctactgaaaatacaaaaattagccaggcgtgatggtgcatgcctgtaatcccagctacttgggaggctgaggcaggagaattgcttaaacccacgaggtggaggctgcagtgagccgagatcatgccactgcactccagcctgggcgacagacagagcaagactctatcttggaaaattaaataaataaataaataaataaataaataatatccttacttatagtcttcatgaagttaatttgttattttggttctttggttttaaaaaaaattattaggtctgtatttacaaatacagacttaaaaatgtaccagctagaatctattaagaatccccaactttggaactaacatttttcttttttagtttaaatgaaaggcaatttgatggcttagttttttaaaatggggaaacaaaagggaggggaagccagtagtatcttgtcgtgttaagtatcagtttaaatcaaatgttaaacaggatcctgcattcttgtaaagtgaatttagtaatggaaactgccacagtggagggccagctctgtcataatcaccaacttgagcatctctgatatttagcagaaatataaatatctaatgcagcgtgtatgtgttatactgtcatggcaaaatgttgtaactgattttgagccagattcttccagtgttttgaagctactgcttggaaataagatttggaagctgaactaacttctacaatttggtaaactatagtaaagttaactcagcatatattataaatacaatagaaatatataattatatataaaaaagtttcatcaaatttcaaaggtttaagtactattttaggatattcatagaacccaatctaagaggaaaatgctcctcactgccagcaggagaacttaatggagcgcagcgttttagagcatagacgttaagagccagctgcctgggtgcatatcccacggctgccactgagtagctgtgtaacctcggtttgctacattttacagtgtactcctctgtaaaatggagataatatccatctccctgggttgttttgaagatctaacgagatactgtgtttcaagtgctctgttgttccattattgtttagttagcaattgttaagttttaggttatttcttcatgacatctgaattttttttaaaatttatttatttgtttattttccttgagatggagttttgctcttgttgcccaggctggagtgcaatggtgcaatctcggctcaccgcaacctctgcctcccaggttcaaacgattctccagcctcagcctcctgagtagctgggattacaggcatgcaccaccacgcctggctaattttgtatttttagtagagatagggtttctccaagttagtcaggctggtctcgaactcccgacctcaggtgatccgcccaccttggcctcccagagtgctgggattacgggcatgaaccacggccgacatctgaatttttatctcattaacaacatatatcctcaagtaatgttttagggtaagttacatctgggaagatttggtattcatagggcatggtagagttctagtggtatgttggctttttttttttttttttttttttttttgaggtggagtctcgctctgtcacccagactggagtacagtggcacaatctcggctcactgcaagctccgccttccgggttcacgtcattgtcctgcctcagcctccccagtagctgggactacaggcatccgccaccacgcccggctaattttttgtatttttagtagagacggggtttcaccgtgttagccaggatggtctcgatctcctgacctcatgatctgcccacctcagcctcccaaagtgctgggattagaggtgtgagcaccacgcctggcctgtgttggcattttaagaatccttggagattatctggtcaaactcagcctgatatgtaaactacctttctaatatcctgttgactaagcccccaacctttacttgaatttaaaacatccctgactcttgggaaattcttccttgtgttgtgctacagttcatctggctgtaacctcctctcccagcccttacttcttccttgtagagctacatagaatttttgtctaacaaataacccatctgaatggtgacagtgaagcaaatgaattctggacaatttaagtgttgtataaaagtggccggatggtgtgtgtcaaagttgagggagctcagaggactttgctccctgttggtaaaagaagcaaggctcagatttgtggttagagctatcctgatctagttgggaacacttttgcctcattgagcctatgatggggctgtgagccagacaggggataggcagtggctgggtctctgggccccccacttgcataaagcacccccatccattgctatacttgtcctttcctggaggaggagcttctttgtgccttaaaaattatctcaccgccaggcacagtgactcacacctgtaatcccagcactttgggaggctgaggcaggtggatcaccggaggtcaggagtttgagaccagcctggccaacatggcaaaaccctgactctactaaaaatgcaaaaaattagctgggtgtggtggcaggcgcctgtaatctcaactactagggaggctgaggcaggagaatggcttgaacccaggaggcggaggctgcagtgagccaagattgcgccattgcactgcagcctgggcaacagagcaagactctgtcttaaaaaccaaaccaaaccaaaacaaactccatctcacgtatttgttcattgtctatttctcctcctgcatagaatggaagctccatgaaagcagaggagaaactgcttatcttgttcgctgctgtttctcgagtagccacaagaacttggcactttaggtagtaggtgttcggtattcaaatgatggaattaaagatcaactctgaactctcaaaggcagatagattttcactttagtgcaggaaaataaacactcatatgtcatgcccattcttcaggcctgaaccaaaggggaacctgtcagaggataggaaatgagatctcagcagcgtctgttactatttgcaattttcaaatacataaagagaaaagtatcttttgtctttttgatatgtgaagattttctagaaaggagaggtttcaactcttattgaaggcgggagacaccatgctatcagaattggattttaaaatcagcccagctggatagtagcttcaaactgcagccagcatgatgtgttacatgagtttagctttgagtgttaaaagaacaagtttgccagaaacatgaattgttaaaaaaccatgaaaacattacaatgtaggaaaaaaatgtagtgaaaattccagtatataatgtccaaatagttcctttttctggaggctttaaacattttcttaggtaatttgcaaagaatattggacaatgtagaaaatatgtgtagagttaaaatgatattgagaattctgagcagatgattaaggaaatctggacctccttttttctttgtttctttctttctttaatatgttagtacttgagttttccatagaattaggacatatatttaggtcagatctcactgggatattccttgggatatcttgattcagggttttcttcctttttttttttttgagatgaagtctcactctgtcacccaggctggactgcagtagcaccatcttggctcactgaaacctccgcctcctgggctcaagcaattctcctgcctcaaggcctcccaagtagctggaattacaggtgtgtgccaccgcacccagccaattttttttttaatttttatttttagtagatgtggggtttcaccatattggccaggctggtcttgaacccctgatctcaaatgatccacctgtctcagcctcccaaagtgctgggattataggcgtaagccaccgtgcctggcctttttttttttttttttttttttttgagacagagctttgctctgtcgcccagggtggagtgcagtggtgtgatcttggctctctgcaacctccgcctcctgggttcaagtgattcttctgcctcagtctccctagtagctggtattacaggcgtgggttaccaggcctgtttttttttttttttttttttgagtcggagtctcctactgtcgcctgggctggagtgcaatggagtgatctcggctcactgcaacctccgcctcctgggttcaagcgattcttctgcctcagccttccaagtagctgggattacaggctcccgccaccaagactggttaattttttgtatttttagtagagacggggtttcgctatgttggccaggtcagtctcaaactcctgaccctgtgatccacctgccttggcctcccaaagtgctgggattataggccactgcacctggcttttttttttttttgagacagattcttgctctgtggcccagggtggagtgtagtggtgtgatctgggctcactgcaacctccacctcccgggttcaagtgattctcctgcatcagtctcctgagtagctggaattacaggcatgtaccatttttatatttttatataatttttgtatttttaatagagacagggtttcgccatgttggccaggctggtcttgaactcctggcctcatgtgatccgcctgcctcggcctcccaaagtgctgggattacaggtgtgagccaccatgcgtgaccccgattcagagttttctctgagaagaaactcccttcgattttggaacccaggaggctggactgccttctagtctaggttctaccttccccctgctgtctggtttggcttaatcacttgattcaataattttatgactttgagtgagttacttaatatcactctaccttagttctttcatctgtaaagtgcggccaataatagtgtatctcaaggttgttgtgaggaataaacatgttaatacatgtcaaatgcttagaagagacccttgcacaatagtaaacactccatagataataatgttattattagccaaatgtggttattttgagggtcatataatggggaaaaaatgcaaatttaaaattcctgtacaaattcaaaggaatatcgattgtctctgtatatcaaagatgaccttagtatttgcaaagctctctctcatttagggccactagctgtttttccatttacacttccctatacaggatatagagttaatttctaggaaattagccattaattattggttaatgatggactaggaatgctctcaggagagctgactagttagaacatgacataactttgaattatctaagctttacctttacgtggaattttaactttgttgaatttttaagtaaagggatataaaagccagtctgctctattattagattcactgtgttcataaggcaacatggaaaaaaatagataatacagaaagaaaaatgacaattttaaggagaaaagtttttgtttttaaataattttctatgttaattaaattccatggatgttttgttattactttgtctctacagagaatgcagcagattttgaacatgcttttttccctctgcttaaaatgtgttggctattatatttcacaggacttacgtcgttttcaaaaatagaggtaattaattgttacgtgttttgatgttcagcaggcaaaggaaacacattactttgtgtaaacagaggttaatatggagtctttgaagtctaaattattgaactatttgcctaaggacaaacttcttaactgtttaggtttcttctggcctgtaataaactacagtggtggaaataacacaaaaaatcctgtgtataaaacatttgggtcctggttgcgtgtttgacccaaatctgcaggtttacctttgagttacactgcgaattagggacctttcatttccattttcctttccttgtagtggtttagttggttcatggttgataaagacagaagcatatgtttctgggaatggtaaaccttaattttgcttaagttttaaatgatcacttatttctggaactggcactggggtcgaagaatgtttattattccatgttaacatgggaatgagtctaaagactaagtgacgtttatgctcacttctattttacagcttccttgggctctagccaaggtgacttggttttgcaagagcgaagaggacctgccttatagtgcagtttttttttttaaattgtttttgtctgaaatgatctaccttgaggacagaagctgtactttgcagagtaaaagacaaactattactggttttaacaaatgaacaacccaggcaggtgggcatggtgcaggttgtgccccagcttgtgaggtctagcagatcttgtggcctttggacaggcttgccttggggaggtggaaacacaatggtgatgatttctaacttgaagagacctttgggactccagtccagaagtttttacctgtgtgtactgggtgggaggcgtgttgtgcttcctgctatgggggtggtgagagccgtttcccacctaagtgggacagggagaaagcgtctgatcggcacacagggtgcagaagcagcactggcccaactccacactcacttttccaggatcattccttttgcaccaagctctgaccctgtgccctctcactgctctggggactgttgaagccacaaggaggaagttgctactccttatgcccttcattcttcctgtgccccagaccgagatctgtcaggggtggggtattggaccccacctgaaatcacttgtgtatctggcagctttcttgggagtttctcctcagggggcagactcccatataaagtactggctggtatgactgcagctcccgttgacccactcactgttcacagaagcctaggaacagactgtagaacccagagaaagctctgggtgacctctgttatttagcagctgcttgcagcaccagtcactgtggcaactgggctttgtttatgaaaatgaatgaggacctcaagcctggggcatccataccgtggacagagctccccctggaaatcgactgcctgccagattgccagggctaaaccaaaacaaagacataccaaacacaagtagccaggaagtattctgcccttggggacgagcaccaagtcccgattgcctgtatccctcttcaccaagcataaccctgccaggctgagctgatcttggttatgccagagaaagacagaggcaaagaacatggtactagtattggcagtttttggaacacagccttgtattgctcaggtctggcctctagttctggttttagatggaaagagtgttgagtaccaaagatctagctttttgaaaattttatttcaggccctgcctttatgtaaactgtaacgatcatttgggtctgtactcaagaggcaggagaatcacttgagcccgggagttctgggctgttgtagtgcactatgccaatcaggtgtctgcactaagttcagcgtcagtgtggtgacttccctggggactcccaggggactgccagattgcctaaggagagatgaactggccaggtcagaaatggagcaggtcgaaactcccatcctgatcagtagtgggattgtgcctatgaatagacactgtattccagcctgggcaatatagcaagatcctgtctctaaacaaaacaaaacaaaacaaaaaaaaaccccttgtctggaacaactgagtttggagtttgttgtccccttagagtccttgctttcatagtgattgttttcttgtgtccaaagcatccttggtagttttaactctccatgggaattggtgagccatggacatcatcttggagcacactttgaatctcagagcttcctttgaggggactgctatgttctgggtgcttctggtattcacaggttctatgattctatggctggacccttctagcatatgtgccctttggtgtcactttgtcagaaccacagccagtgcatgggtcttctgatgccatcctgtggctctcttccccacaccatgccttgtttttttttttttgtttgtttgtttttttgaagaccttcgagtctcgctctgttgctcaggctagagtgcagtggggcaatctcagctcactgcaacctctgcctcctgggttcaagtgattcttgtgcctcagccttatgagtagctgggattacaggtgcgtgccaccacacctggctaatatttgtatttttagaagagacggggtttcaccatgctctccaggctggtcttgaactcctgacctcaagtgatctgcccacctcaccctcccacagtgctgggattacaggtgtgagccatcgtgcccagccacactgtgccttgttactgcatgtctgcttgggtcatggcccaggtgtcatggtggagggggcggggttgggaggtagagagtgctggcattggtgatttgccagcaggacacatgcccaggaagatggtcagaaaaagagggactccttcacgtacgtataagtcagctttagccttaaagcttcaaacacccactcactgcattgaggagtccttgaggtccctcacctgctcttcctggtctgactagatgccagggaattgggagagagggacctgcagtgggagggtcctggaactgcagtgacagtaatacaggcttaaactagaattccttcctggaagaatttcggtcttcctctaccccagcagcctttcactccttaactttagtagtgtgccttggggcttgagcagctgctgcttctgtggaggtgaccatccagagggaccctttcacagctaagttcacttgcacctccgtttctgcttaaggcaactacagtttcgggggtggctgcccctgtttgctcatgataattccttatgaactctcctgttgataaactgaactggatcagctttagtttccctttaactaaggatttaagtcaaagcgtaaccacaagtgtcctgttcgttttcattcatttcagtgctgaacatttatacactgggctatggatttgatgtttccttcctgtcttggctgagatacctgtgtgaaatatgagtttgccatttggcaaactctttttcctttgactagttaatgaagccaaaatattgacgggggtgtggagttaggggaagaggaggtgtgcatggttacatttgaaagttcttcatggtgcaggagaatccagtgcttcaccctgagtaattgtaattagggtagtaagtaaaccctttcaggtttattctatagcgatcatgacgagttatcttggggaagggataaagaagactgtgagaggttgtacagttctgatcctgtcaggctttgagaagcagacctcagcgtgatctgaagagccggtaccctggagtagatgattaaccaagataatgttccggacagtctgcagctgaactgaactggtgtctctgcatccattcatagttacccagtgtggttaataacaagtccgttgggagttatgcctgtgctggccataactaccttgtattctggatgggggtcagagaaactgaatggatcgattcattcactgagtagtgagtgactgcagccttactgaagccagctcctttccagctctttgatgacatgcactattattgttgttaacaggttggctaaaaaagtaaacctgggagagttgaggctttgttcctctgtccagcactcagatatttcctgtagtcattcagtaaacatttaccaagtgcttactgtgtgccagggactgtgttatcataaccagtaactttttcttcgttaatgaattatctcatgcggcgtgcatacaaagaagccttaagaagtggaggataatgggggcctgtctctccctgctcatcctttggggctgtcacatcacggaaaggaagtaacagtcaacttaaatcagtttactttggtaatagcagtttttgaaaaggtttggagcaggaaattgaaactcttgagaaacaggaggtttggggattactgctggatttttcttattcctgctatcccaaggacttgatcccagttaccactgataatggaccccttttatgtttaactgtcttgtcagtaagtcagtgacacatgctgagaatagaaaccagtaccattccatgtcgtaaccgccagcctgtacacgccccgctggttctgttgttgtgatcgttgctacagcgcttaacatcaaatgccagcctcatgcctggcactttacatcacacctacggcgtccccaccccgggagcttaccttccctagaagtccaggacattttctatgttggcaccacaggaataggtagagggcaagggacagaaagttttcctcagtaaaatgtggtctttgcttgaatcaataaaggcaactatgttcatctgttttaataggaaaggcctgtaggtaattttttttctccgttaaaatctgcttttaaaaatgtttggggttgagtataacaacagattgataactctctgttcatcgcttttccgttcttgcaaaatatgtgacttgcagtggttgactaagtgctaggctctgacgggaggaaatgagacccgtggaactcctggccccctgctctgtaggtgcctccagaccagggaggggagacaggcatcaggtggcatggccaggccttttttttttttttaatagtggatgggagaaaatgggaatatgactaattttatttaatacttaggttgttttgtctgtttgctttactggcatagggtcatcttcagctgaagaaggatgtgctggtgcttaggaatggctgtcaggagccatcggtttgctccttcaaacaggaagggcaatgctggcttcagctaagagcgagagaggttctttccccagacacccagtatgtctctctttgcaatcattggctgaattgactcagcttttcctcccatccttgaatcagtccctggtagagtaatggagttacagtgattggcttaggacagtcagctggagaatcagtcacaccactcaccacagcggcctcctactaaatataaatgtgagcgggacttaaaatagaagaaatgcacatctaacaggaccataacttagggataaggtactggacaaggtaatgaagaggcgatcatggcccttgtttgtgtttcctccgttccctcggcagccttctaggggaccctctaatgtgctacctcactgtgtacctgtctctctatcctgactccacctgtcactctctctcgactctgggagtatagctgcttaaggccaaggcactctgtcttactatttgtggccactgtagctggcacatagcagggacttaatatgggtttcagcaaattgaacgaaaaaggatacttcgtattcctttgtgtttaacttttatcaaacattgcttgaatcaagtggatttttttttttttgagatggggtctcactctcacccaggctagagtgcaatggcactatctgggctcactgcaacctctgcctcctgggttcaagggattgttctgcctcagcctcccgaagagctgggactgcaggcacccaccaccacgcctggctaatttttgtatttctagtagagatggggtttcaccatgttggccaggctggtttcaaactcctgacctcaggtgatccacccgccttggcctcccaaagtgctaggattacaggcgtgagccactgaacctaaccacaagtggactattgatagtatattcattgcacattttataacaagtttattgagatataatacacataccatacaattcacctctttaaagtgtacaatcatttttaatatgttatcagagttgtgcagctgccaccacagtcaattttagaacattttaatcatcctccaaaaaacctctttatccattggcaatctctccctattcttccctttccccaggccctagtaactactaatctattttctgtttctatggatttgcctattctggacattctgtagaaatggagtcatgccatatgtggccttttgtgaccaatttctttcacttagcatgttttcaaggttcatccatgttgcagcatgtatttggtatttcattcctttttatggccaagtaatattttgttttatgtatataccacattaaaaaattcatcatcagttaatgaacgtttgcattgtttcctgtctggggatatgaggaataatgttgttatgggcattcatatacatgcaagtttttgtgtgggcttatgttttttcccttttttctgggaagtatggctttggccaaggccagagtcaagcacatccttatgtttttatttctcttgtatttatatgtgtctgagagtagaatcgctgggtcatatggttactctgtgtttaaccctttgaagaactgccaaactctttttcaaagtggttgcattattattgttattattttttgagacggagtcttgctctgtcacccaggcaggagtgcagtagtgcgatcttggctcactgcagcctccgcctcccatgttcaagcgattctcctacctcagcctcccaagtagctgggattacaggtgcctgccaccatgctcggctaatatttgtatttttagtagagatggggtttcatcatcttggccaggctggtctcgaactcgtgacctcgtgatccacctgcctcggcctctcaaagtgctgggattacaggtgtgagctactgcgcctggcctgttgtattattttatactcccagcaacaatatatgagggttctagtttctccacatgcttgcaaaccttattattatctgtcattttgaattagtcatcctagtgggtgtgtaatggtatctcaatggatgttcatcaatgaaaataaacatttgaatgggcacccatggcatgtcagatgctctttcttaggtgtgggggcaaagagatttgcagccttcggctgtctgtctctctggcctcatctgttttcacatctttcctcttgatttatgttccctaaataccaaactgtttgtagtcctcatactatcatgtcatttcttacttccagatctttgcctataatctaaatattaatgcagtgtgaatattaatgccattactagttaactcttaaacagccaataaattatagagctggcagtctggctccagagtctgtgttctgtactacatactctttttttcttttaaaatcaactttatatcgaagtataatttatatagattaaaatgtacactttatttatttatatatttatttttgagacagggtgttgctctgttacacaggctggagtgcagtggtacagtctcggctcactgcaccctcaacctcccaggctcaggtgatcctcctacctcagccttctgagtcactggtactacaggtgtgcaccactaaacttggctatttcttgtattttttgtagagacggggtcttgctatgttgcctaggctggtcccaaactcctgggtttaagcaaccctcccaccttggcctcccaaagttttgggattacaggcgtgagccactgcacccagcaaattgcacacatttaaaggtacattttgatgagtattaatgaatacatatgcctgtgcaatcaccactgcaatcaagatacagagaatttttctattatccatctccacccctttcattctcttcagcctccctgtagtccatatccccagtcccaggcaattactaatctgctttctgttgctatagattagttttgcctgttctagaagttcatgtgctcttttgtgtctgacttctatttgctcagcaaaatgtttttgagaatcaacagccaagttgttgcatgtattagtaatttgttcctttttgatgttgaatgttttccgcggtatggatataccccaatttgtttattcattcacctgctgatggatgtttaggttgtttccttttagtattatgcagttaagtagctatgaacctctataaacatgtctttttctggacatatgtcctcagttttcttgagtaaatacctaggactgtaattgctgagttgtatgtaactttataagaacttgccacgcagttcttcaaagtatgtgtacctatgttggttttaatacagattcatcatttcctatccatgttgcttgggtagattatattaattcttaagaatcacctcagatatcacctgccctaggaagcctttttttgacccttctcatcttccccttctttgaggtgaattagggaggctccccctccaggctcccttaacaccttgatgattgagtgttcactggcctatctttcccattagactgtgagctccttgaagaaggaaaatgcgttattatttctgtatccccaggaccttatatagtatttaccatctagataggtgctcaataaggcttgtgaatgggcgactaaataggacattattcatctttatttttattttatttttgagacagggtctatctagttctgtcacccaggctggagtgcagtggtgtgatcttggctcgctgcaacctctggctcctgggctcaagcagtcctcccacctcagcctcccaagtagctaggactacaagcacgtgccaccacgctggccaatttttgtatttttgtgtagagatggggttttgccatgttcccaggctggtctcgaactcctagactcaagtgattcccttgctttggtctctcaaagtgctaggattacaggcgtgtaccaccatacccggcccttattcagctttgtaagggggtttatggccctgtaagggagataaaataggcatgcaaataactaatgtgaagcagaaattaatagagttgaagaacaaagtctgtgagaagtgaaagagagtgatagcttttagtgaggaggatttgggaaggctaataaaggagatggggtttcaactgagcccccaaaatagattagatgtgctgagatattattacccgttgattctaaagggatttgacttgatcttctgttctaaaagattggtgaggctggaaaatgaagtttatgtttgggaaggtcacactaagattcatcttttttttttttttttttttttttttttttaatgctttgctcttctcagcctacagcgggcactaggagatactggaaatgttttctgtttggcagtagaagaatataaatgtggcggtttgtctatcatctctccagattctaaaggcttctaggtgggattgaaaagacttctcttatcctctttgcctcttaccccatatggtaataggtcacataagtcacactattgccaaagctctgcttagccatttgtctggtctctttggtctcagccacctggcttcactatttagcacatatttgtccattgtcttctatagcacatgttcatagactattagagctgggaactttcaaaataatcaaatgataggccctccctttacagaggagaattgatactgaaatctagagactaacctggttaataatagtaaagataaaagctgccatttattgaccatttaatatgtatcgtatatttgcatgcattatgtaatcctcacaaagtgtagatgtcttcattttacaaatgagaaaactaaggcaaagtttcagatggtatagacagaaccaggattcaaagccaggtcttttctctacagcatcctacccaggcaaggccccaggtccgtagagttgctgaccacagaggaggaggaagttgggccacagctctcaggtctatgagagggcgttgtcactgaagtggaggaaaccaggattctctgcttcctagagagacactgagattgttcctttaaaccacatatgatttttaaaataagatatgtagagcagaaaccaatcaactagcattggctttggtcagaattatttttatgataaagtagagcatatttttaaatttttaattatctaagtaatattcaaaaacacatttgcacagtaaaagcattaagaatgtattaggttggtgcaaaagtaattgtgttttttgccattacttttttttttttttttttttttttgagacagtcttatctctgtcacccagtctggagtgcagtggcatgatctcggctcactccaacttctgtctcccaggttcaagtgattctcatgcctcagcctcccaagtagctgggattataggcgtgtgccaccatacctggctaatgtttgtatttttagtagaggcagggtttcaccatgttggccaggttgctctcgaacccctgaccttgggtgatctgcctgcctcagtctcccaagtgctgggattacagtcatgagccactgtgcccggccattactattacttttaatggaaaaaactgcaattacttttgtgtcaacctcatagaaggatggagagcaaagtcagagttcctctcgtgtctccaacccgtctctagcatcacccctaccttaggtaagaaccatttatagttagagttatccatttaatcctttttctatgcatgtatgtgcatgcatatggacaaatacacatagttttagaaggttaataaattgtatcattctttacatacaaaaagaacatgtcataagatatttctgtctgtacaaataacagtgttttaaatgcagcatatgtatttcatgatatagatacaccctttttgatgaacatttaggttattattattttagacggagtctcgctgtgtcacccaggctggagtgcagtggtgcaatctctgctcactgcaagctccgcctcctgggttcacgccattctcctgcctcagcctcccgagtagctgggactacaggtgcccgccaccccgcccagctaatttttttgtatttttttagtacagacggggtttcaacgtgttagccaggatggtctcgatctcctgacctcatgatccgcccgcctcggcctcccaaagtgctgggattacaggtgtgagccaccgtgcccggctggttattttaaagtatttgtttattataaatactgtggcagttaacatctatgcctgtaatactttatagtaccataacagtgatgttgttatggtgtagtacagtaggtgtatttacattgatatcagttacagcctggtgtaattacagttatgatgtaatgcctttagagagaggttggacagttcagttgctgtcccaaacctggctgagaagattacaaaagatttaaaatatttctactggtctttattattgaatgactacaccctctgaaaagtatgaattgagcattatgattgctcataggtaaaaggttagcaggcatttaatatgtgctaggtattttcttgtgtattctctcatttgagtcttataataatctcataaagaatgtgctgctattcactgtttatctggaactaagactgagaaagactgtggcttgcataaagtgacacagcttctaagaagccagttcaagatttgaaccctcatctgatgatcagtttgttttttctttccccattttctgaagctggttcattctcttaagaactgtaaggagaaaaatgatagaaggcagaatatctttgaactaatgaaatcatcgcatgagcagagaagcagagtgggcatcctgtggatttaggggagggagggggtggtaaagcctctgaacctgtcactggacttggaggtgtgattcatgacttcaggatagtggctatgctgagagaccttggtgtctgacagcaacgtcctgctattgtaagctatggatttactgtcatgctaagaaataaatcatgaccaggaaaggctgtatgtttaggtgctgctgatgcctgtaggccctctccaaacaggagaatggctctcagtggatgaattgtctcagcttcctctgagttgtaatttctatgtgggtcaaagggttatttttagcctgtgggatccctagctctttgaggagtggcctcgcttacaaggtcagtggagtgggatgatggtcgggattttttttttttcccagacggagtcttgctctgtcacccaggctggaatacagtggcgcgatctcagctcactgcaacccctgcctctcgagttcaagtgattctcctgcctcagcctcctaggtagctgggattacaggcgcatgccaccatgcctgggtaatttttgtattcttagtagagacacggtttcaccatgttggccaggctggtcttgaactcttaacctcatgatccacctgcctcggcctcccaaagtgttgggattacaggcatgaaccaccacacctggcgatgatcaggatttaaggattgtttctgagctcttcctggaccctgtgttttaggtcccccaaagaaggtgtgaacagccttttggaatctgttttactctggcaaaataatctgtgtccatagattgcaggaggatgctgttggtgttataataatgctctcacatttaaaaataagttatcaagtgtatttgaggaagaaaactaagaaaatctggaaaaaaccccaccatcaacaaaagacatgcaaaactctaaaacttgtaataggataaatgatgttcttgtaatgaatgtgtcagcattttaacacatgtgtgctcagtgtgtggtgatgcaggatgtgtataacagaaagcacaaacgtggtctgtgtttacattaaatctcccacctccaagacacacacacaaaaggtcccacttgagtatgtgtaattacatctctgaatactcccttgatcctatttttttccttttccctaaacacatattttggttacttctccaaagatacatgatatatattagcctcactcagaaccacagggaacatactcaattgaatcacacctctatgagtagtgtataaagtgtaacattttaaaacaccagggaccagggctggcaaggtccacggggaatcctgaaggctggtttccagccacaactgtgctggaatgaaaatagaaaacaatgaggcatgtgcagagtcagcttttctttgtgtcacagctcagcagtttttctgctgtcctaaactttcctaaaaaaaaaaaaaaaaaaaaaaaaaaaaaaaaaaaaaaaaaaaggctggggctaaggggaaatggtgcagttgcagttgaaatttttttttaatagtaaagactgaaaatataaactaacagctggtgctgtaggaacatgtgaaatgaagagtgaattaatggtgagaaatctcactgctctttgcttggctgtgaggacacgcgtaggaaggacttgtggaaacttgtttggtaaaatagaaaaaaaaggaaaagaaaaagctaagtaaccatcaagcctttttcaggagtgggggaaaaataaaaatttatatactctaaacttaaagctttatttatgatcattattttaaatatctgtaaatgcatctgtaaaaaactccagccaagacagagggagatgtgaattatcaagtatattgactttttttttttttttctgttatcagtagcatccttcagaaagtactgattaaaaaggaaggccattcccagttcttggtttatttgcctcatagcgcaccaagtcaaggttgagctggggccttattccagaaagcacaggcttcctttctgattggaaataatatgtattttgtttgaccttcagaatactcatggctttactggaatacatgggccaacatttgtcctggcaaggccagggcagtttaagataggtatccacagggattgctttatagagcaattaaaagcagtgggagggaggtgactgcagaaattcagacgtttgcatcctttctggcctaaaaatcaagtgagtaatttcaaaaagcagaatttgaaaacaaacaaacaagcacttctagaagtttctgtctgaacacttgagaattttgccaaggtcatagtgttctttattttttctttttccttacatgttactttctgaaatatgatcatagtgttcttttgcaactgatcttggtgtgaagagggggttacatcttatatattacacagtgctaatatgtgtaatattaacatttttttgaaagattgtcaaatatggaccgtggaaaacagtttccatgccgtttgaacgttatgttctttatgatgctttgtttataaaaatattgttagatagccagggatgtttactactgccagctggagttaggcctcatggtagctttttaaagtcaggctggaggtgaattcaaagcctaacacagagtttcaagttattgttcttatttgaagtaaatgcataattggagactgtattctgatttcttgaattcttagctatgccagtaattcttgtttcttagggccacagtttggttctgtcaaatgtgtagttgtagagatgataaatgagtactcagagattagatgaattcatatatggtgacattaagatgttttctttaataagaatacctattatatgggagtaagtgaaaataatcatgtcttaatgttgttgaaatcctgtattcatttgggggaaaaaaagtaagtactttgtattctgcttatgtaaagggatatgaaagaatgtatataactaaatttcttaatgcttcattttgcttttgatgtgcaaaatataactttactgctaggtaaaattatacttgaatattaacagttattgcatgagtttaaagtttcagttgagcccaatatatgggaaccacgcagtttctagtgattttcaaaatatagtcccataaagatgaaagagactcaatagctgaaataggtggtacacttgatttaagtgaacatttgctaacccaggaagaatcaggagccattccaacactgtagctgtgtaccatagatacaaaataatatgttatccaacttagtatgtatttgcttactgcagttgagaacgcaggagtggtcagtgaagtgtagggattagggaaaataattgagaaaaatgaggagaaagaaagaaaaatagatgttttggtaatctttgtcaaatgttttctcaaagaccaggctcagatttaaaatattatgcagatgtagtctttggcctctggtagtttctgataggaattcagccttgagttgaactttgagatgggttgttttcttttcgtttttttcttttttaattactaagtgaccaatctgttgtagtttgttgatctattttttcctcttgccatccttctgttgctttctccatgagctgctgtttattctggaatgttgaacatccacatttagaattaggatttgtgtggctctatcttaaccaggaatggaaaaaatccaacccagtctttcaattcatgggtttaagtggattcagagaggttctcatccacagtgacaggttcagaattcccacttctaaagcccccgtttcattaggtaatgaatatacaagctgagcccttccaggttcacactgtggaggcttctccactcctctgtcttggttggctttcttccttggggtgtttgggaagagtctgattacagccaacttctttccttgtcagttgattttataacacaaaccattaaagttcaaactttttgttcagcagattgatttcatttgtctcttctatagggatctcacttagagtttatagaattctttgctatcctttactttaattcattttggcaaggtatgtagtattaactccaggtgaggcaaccaagagaggggccctaagtcaaggaacttgttaatggcagagatgagcctggaacccaggccttctaggtccaaatgtagtgttctttcctctgtgctcccaaggttcccattgtatcctgtgggcttcttttttgtaacgtaaagtgggtagtgaggagaaaggaggttcttttctgttgatctttcatatacttattgatgttatctttatatttttatagaacttcctgatttaattaaacacttctcaaatgccatgatctcatttgttttcatgatgaccctgaggattagctaggacaggactatccctattttattttattttattttattttattttattttatttttagatggagtcttgctctgtcacccaggctggagtgcagtggtgcgatcccagctcactgcaacctccgcctcccgggtccaagtgattctcctacctcagcctcccaagtagccgggattacaggcccccacaaccatgctcggctaatttttgtatttttagtagagttggggttccaccatgttggccaggctagtcttgaactcctggcctcaagtgatccacctgccttggcctcccaaagtgttgggattacaggcgtgagccactgtgcctggcctcaaaaatgcctgcttttataaattgctcacagtatagtagagatttttacagtttggagggtgttggaggttaattttgttgaaggaagtaatttctctaatgtggaggaggtggtaatttagaagactatgttgtagaactgcagccgggtatatgtttacttttgtgagcgcctgttttatttgcccgtttatttatacctatgcattttgatagaaaaataaatatagttctgttttggctccctgaaatagtttttatattttctggaatttcctcacttattgtctttaatattcctaagttttattatgactcattttggtcatacaatagtagaagaagtaggtgtcggcctgtttgaaggggtttattaagtaatttggggaagtatatttttgaagcctataaatattaatttgtccctggtgttgagatttgtcttgtggttgtcagttgtgcatgttcttatatgttttggataggggagagtaaaaaggggttgagcatagtttatttttttctttggctcaaatatgtagttttaccataaaccacggaaagtttcctgttcttgtttgattaaaaaaaagtacacttccattcattgtttccatgtaacttcctatactttttactaaaaaaggttgaaatctaggataaattatgagctatctctcgggcaaagaaacgatttcatttcaggaaggagcttaggaagcgaaccttcttgagtatgagaaacagtaatagcccttggcatgtatgtgtgtgtgtgtatatatacatacatatacatatacatatgcctttccttacataataatgatttgcaaagagtgaatttggaccccgacttctaatcaacatggaaaggcagggaagattccatgtcatggctggattttagaaagctgcaaatggtattgtaccatagagcaggggtccccacccccaggccacggacctgttaggaactggggcacacagcaggaggtgagcagcgggtgagtgagcattactgcctaagctccacctcgtgtgagatcagcagtggcattagatttttataggagtgtgaaccctgttgtgaactgcgcatatgaaggatctaggttgcctgctccttatgagaatctcacgaatgcctgatgacctgaggtggaacagttccatcccaaaaccatcctctcctcctcggtctgtggaaaaactgtcttccatgaaaccagtccctggtgccaaaaaggttggggactgctgccatagaggggcctttgggtggccccgttaggtgttttctttgtgaggtggtgctttccagcctgccctggactctgtggttcatggtagatcattcgtactgacctggaccagggagcactggtaggagtatctgatttctatgaacagtgcttgctggcactgactcaagaaagaagacaggaaggaatggtgaatacaacttccattgagaaactagagtggaaaaaatgtgcaaattatgctaaaattgtaattaatctgggctgtacaggttgaatatctcttcatcctgaaagaaaaggggaggtcaccatgagaaaatgggattgagggaccataagaactttgtcatacctagttatacatttgtttttttctcttagaacttctgaaaagcttgaagccccagaagcaatagaatagagcttttagcatggttttgttgtgaactaaattcccaacagttcacctttagtgcataagcttaactttctttgatggtttgccattcaaattagattactgtggacagtgtccctaatattgtcactaatattatgatacagtatcagttttacagcaggtttgtgcatcatgaaggaagtcagaacgttttagtgagttacaaggaaaatagccatcaaaagtccatataggttactctgtggatgggttggggagccatcttctggtcttcatccagacttgattgacttaaaattgagtatataagagtgtaaaagatggtaagtgataggcttgaggcagagacacaggcctgcagccagaactggaaaaaaacccacaagtatgaaaagtataggcaaaactataaagcagccaggcacggtagctcacacctgtaatcccagaactttgggaagcagagatggacaaatcacctgaggtcaggagtttgagaccagcctggccaacatggtgaaaccccatctctactaaaactacaaaaattagctgggcatggtggtgagtacctgtaatcccagctactcaggaggctgaggtagggagaattgcttgaacccgggaggcggaggttgcagtgagctgggacggtgccattgcactccagcctgggcgactgagcgagactccacctcaaaaacgaaaccgaaaaaactataaagcacagaaatatgggaccatttggtagatatagtaactgaaatcacatcaagttttaataaactaattagtattcataatggcagccctacatcttcaagaaaaatatacaataagcgagtttcaggatgctcaaaatatttaagatggccaagaagaaattatgcatgtagtacattttaggcagattttccttaaaactgactaaagacacttacttttttgaaacaagaaaagacttagttatttggataatttgcttatgtggaatatctcattgccagtcaatgttgaataagtgaggcatttattgtgtggcggaaaggtggttctttgggccagatgaagtaaggtgggaagaaaggaatatgaaatactgagagaaggaattactactttaaataatagatgtagctttggtatgtttttctgtgcaaatcttgagacaaagccctttttgttggaggaaatggcatgcaagggattttattttcagtttgaccatttgcaagtattagagctgtctccatgggagaaaggtgagttccctctggcagtgtggtttacgaaggtttgcttgggaggaaaagagaggagctagttgatccagagtggaaaaacaccaaagcaaagttttctccaaaataacacacacggatttctgaaaaacagcagttactttcactgaatgtgacaaacttcaaaaaaaaaaaaaaagggaaatcagctttgaaacatcatatgacacatctgttttggaaggttgctttgtcagatacagatgtatgttttacagtatgttactatgtaaagtttcgtcttgagcaagctcaatagatgtttttctgaacaggtatctcatttatcccagttttaaatttttgggggagagtttattaaacaataatagtacagtactttatcttatttttaggttaaatacaatttgattgaattatacccttctctcttagccttttattgaactgatatctctgcttagattttatcctttcagaaattgcttattgacccgacacagcaaaatccaaactttttgatatatgtcatggcatatatcatgccaagatcacaaactccatcacatgcttttagcaaataaatgccagtttgcttcttgctttcatacctacaataatgcaaattattggtttaaaaagttaaaaatcactgattcttgctttattacaggcctcttaaattgagaccttggaaaagtattttcttgcaagagctgatgtttcctattattattattattaatttattttttaagacaaggtctcactgtgtcacccagactggagtgcagtggcactatcttggctcattgcagtcttgacctccctgggctcaagggattctcccacctcagcctcctgagtagatgggactacaggtgtgcaccaccatgcctggctaattttttaatcttttgtagagatgaggtctcactctcttgcccaggctggtctcaaacttatgggctcaaacaatcctcccaccctggcctcccaaagtgctgggattacaggtgtgagccactgcacctgcctgtgatttgtttcctttttatgatatctatgtgagcatcatattttcttttcatcctgcctgctagaaagcgcagagctaggtttggcactcaaatgatgtagtttcctttagctaagtgctttgatgaagtttctcttttgcatttttttttccagaacacatctcatagttgaagagatggtaataattacagtaatacaataataaaaatgagttgatcctaagaacagtcttatggggcagatcctgttattatccccattgtatagataaagaaacagaggcagggaatggctaagtagctgccccaggttaaaaggctaaaatgtggcagcgctgggattaaacgtaggagactggctccatagtccttagagaattagcagcttgggagtttggttgtttggcacatgaattcatcactcaacaaatgtttatgaacacgtgccgcatgccaggcactgtgtcaagcactgggagagaggaagtaaaagaaacacagtccttgccctcatggagtttctggtaagtagaggacacacaaacatatgcccaaataaatgaagcaatagatttataaaagcttatatttgctataaaggagtaacaggtgtaacagtttaagggacctctgaattttatcaggtgcaatacaaaagtgtagttctgggccaggcacggtggctcatgcctgtaatctcagcactttgggaggccaaggcaggtggattgcttgagctcatgagtttgagaccagcctgggcaacatgacaaaaccccgtctctacaaaaaatataagacatgagctggtgtggtggcacacacctgtagtctcagctattcgggaggccgaggtgggaggatggcttgagcctggaaggtagaggttgcagtgagcccagatcgcaccatggtactccagcctgggcaacaaagccagaccttgtccccgtccacttacccccaaaaaactgtggttctgaaccacagcaactgagccgagcacaatccttctgtctctctaagacccagtctacactgagtagttctgttgatggcactgcttgatgggcctgtaactgccacaagctctggaaaaaccaggtccacagcttctcagagccttttagcttcactgtgaaaggagcaagagcacaccagtgaccaggtgttcataatttctctgcaaatgtcagctctcagtttccctcctaacagaagcacctgaagcagcaggctagctagcctgaagaggaaggaatagagtttagtcttataattgggacctatatattaagctgaataatttggcattcagtgttaagcatttgactcattcctgtaaccaattgtgagtgccctgattatgtataaactccttaaagtaaatgtgttttagttcgtggcccagtgtgtacacatggctgtaattaacaatattttgcacagccaaaccaaaagtttgcagattttccttttttaatccatggtctcctatctgcaatcaggaccagtggttataggcgatgattcaactccccagcagttgtggtttcccccttctgcccttcctgaccctcttacagtttctcatcttgccacttgtctctgcttcagactctgcaccccagaccctggccaccagccctaacagaatgctcaccaggcccagagcatgccacatgcaatgcatgttattcctccgtgcttttgcacacattcttacctctctttctcccatctttttctttcttgctagacaccagtttgcaaatgataaaaaagagaaaattagtgatcatcttaggtacaaatcaaggtctgagagatgaacagatttggtaatgtcatccctcagggttaatgaggtgtagctttgtagctctgcaagtcttactttgccatcagatattgcattagtaggaattaagttgtaatttttttatgggataaagttcagtttaatattttgaatctaagtcgataaagcatttgcattttaataaagaagtgtactatccttcagttattttgtatctgccaaattcatagggtaggagaaaaaagatcttattttctcccatccttcaaaccttcagatttgttcttggtctctgttctgagccaattaggcagtaacatcccataaattcttatcccctccaaaatgaatgctgtagccagtgtctccttctgtttaagcttccttcttgtgagaagaatagggacaggtgcaccatattattggtcaaaagtaaatcagtgctcggtgtggtgactcacttccagtactctgggaggctgaggcagaggcaggtggatcacctgaggccaagggtttgagaccagcctggccaacatggtgaaaccccatctctactaaaaatacaaaaattagccgggtgtggtggtgcatgcctgtaattccagctacttgggaggctgagggaggagaatcactcgaacccaggaggcggaatttgcagtgagttgagattgcgccactgtgctccagcctgggcgacagagtgagactgtgtctccaaaaacaaaacaaaacaaaataccaaacaaagtaaatcagaagaactgttggccaagatgatgccaactgattgtctttatggattgatggaattccctggaggcagaaacatggcctgttctcgcctttgggagttgtacttccagaatgtgctcagagaacaggaatttttactctaatactgtgcatagtttaatttaattaaaaaaatttttttaaagagatgggggtctggttattttgcccaggctggtcttgaagtcctggcctcaagcactcctgctttggcctcccatagtgctgggattacaggcatgattacagggagtacatgcccagctgtagttttattttaagtctttccagtgcaattcatagaaataatttctggggagtaatgctagggagtagtataagaacatcttatcttagatattttattaatcattctaaaagtttttagagaaaacagtttttgattggagaaaatgttctcattcatttatttctcttcccctcaagggactttatgtctctaatagtatttgaagtttgtaaagcgttttcacatatagtgcatcatttgatctataagtcaagcctgtcatagaataagagatcatggaatgcttaaaacccagctcctgtatctcctggttcactatttcccggtgcttctgtaatacaaggacacctcttgctatgtccagtggtgacttctgagacatgccactgcttcacttcaggtcataaaaaccatgaaacataacagcaccacttcctcagagggctgcagaaatccccctctgttggcacgtccagattgtatagtggtatcttgtttagatggaagagtatgtgccttttatagcttggcacttcccaacactttgagaatttggattcctaaagaacctgtgccctttgtttccttttgaacatttgaaaacacaattgaatacaggaaattctccaacatggttgctccatgatttcaacacaacaatacacaaatatgcactggcttttggcccaaaaagttggtggttgacttcttggaagagggttagtttgttaggaggaaggtttggatgtagattttgcttggagggtgaaagaaaccatgataagatatgcctaagagttgtgctgtagaaaaatctagtttttttccccctgagaaatccaaattacaagttttaggacttgtctacctttttcctactagggataagcttcagcctgaagccaggttttattgttgaaaaacccaggtaggagctgtggtagaagcgccctctttggagtttaatggtggtacattccaccgctccatccccaaggcgctgtagttccaatgaattgtaatttgagatggtacaaacatgagcatatgttatgtacacgtcaggcgtgtttgtgagctcagggcattccaggtgtttttttcttggagctttgtttttgcgtcatatcctgtgttggtaacattccttctcatgaagctcgattgaagtgaggcagtgctattggctgagaaatcatcctgggtgccctttcttacagattcttgcatcccatgggggtagaaaggattttcagcccaagggcagaatagatcctgtagtacccagtcccacaatctgtgggagtttgtccctctttgcagctgacagcatttcagaattccctgtgggacaataacaaaaaccttattagccaatggtgtcattagaataaaatctccccactgcgatgtcttggtcccagcctataatgttaccccttaattccctctgcatctttaccacttttattacagctgaacacacgctcctcattagaaccctgggtgatatggggaatcagagtgctgaaaattatgtggaataggtaccagatgtttgtgtcaacttggtatgcattggtatttagaatgcttgaggatcacatttattaaatgtgaaaattacttactatgtcttctccaaaacattaccccccccgccagtatttttgtccatgttgcatgaggtgtgatattagtaatttcttttggcactgattaaatttaaagtctgtgcagcaaatgcatctgttcccaaatgctttgtctgcgttctgtcgagttttggagctggcccaccgccagcagggatgtgggggttctgtaactgagattggaatgctgtgttgcagctaaaggacataatgaaagggtgagtccatttgatttttttctttaagtggaactgggaatttagacattgatgttatagcgagatcttaggaacgtttcccatgtgtccagataagcaagcattagtgaaaaggatggaggagggcatttggtaaaatgagaaacgagtttcattaagttcatgaagtcttttaagtcaaccaaaggtgatacgtgtgaaccgagcagtttattttattttagtagatatgaatgaatgtttacatttggcctatgcatctgttcacccagtcctgaggcgaggaactggaaagtacaaggcagaggcaggtggtgctctgccaggggaaaagtctggagctggagtctcagagacccaggttcaaatcccctattgccacttcctgctgatgtgtttcttagcctctcatgagctccagtttcccatcactctaaaatgagggcattaacactgtcttcacagtggtattgtgagaatcagaaacatgtacaagatgtgtggcccctagtggtgtggtaaccatacatatgaagagttaacccccagcttctcacacaaggcagcggcccagggagccaccatgtgcttcacagtgtggcctcaggtggcccagctgctgagcacccgagcggtgggggcctgctttgtgaaggaggctggtttggcagtggccttggcagtgtggccgtggtctgggccacctggggagtttctcaccagagtttatttgaatttgtgctgtcttcaggtcagtaaatatttttgtcagtagaagtagcatcttgtgggtgaagggggctgtgcctctgtgctggtggccgaggagagtgtaccaaacagaagagcagagcctgacttcagttcaaacaagacacgacacccggcaagattttgagatcagatttctcgagtaagccagcaggggaggattaaactcagctcacactttgagtccaaggaaaagttagatttctttgggagctacccttaaggaatcttgtactcgtcacataccagatgcccagaatgaactgaaatatccagattgggaggcaccagtgaggattgtctctggaggtgaatccatatggacattactgccaggaagcacttttctgaaatacacattctacctctgtgtggctcacaacagtttacttatagtgggttatagagtttctgtgaggctttggatgaagtatctgcaacatgccttttcatgatagagtatggtgtgaagtgagcacgcgtgtgtgcttatgagcattgttgctttcaggtgtgttctttcgtcatcgtccacgccctggttgatccttacgtggtaacacagcttttgctgtgctgctgataaggagcatcatcagagcatgtcactcacttggctcttgactgcagggaagagattgcgtagggaagacgggatgtgggttttcagccgtggccacaggagacactcccagccttttgaggctgccggtgagggcctacagtagcagctccagagctcacaggtcaccacaaaagtgagcagatgagtcagatggggtttcggagcatgttttcctggtttccaagccttcgtggctgggaggtgctatactcgggccccatggtggtcaagtgagaatctgagccactgtgttaactcaggcacttgtgctagagcctgtggggtggatcatgctgttcccaggtggaagccttcctgaatggagctggccctggcattgtgcagacagattgcggaaggaaccactatgaggccaagggggaaggatgggagacaggttcatgagctggctgtggcagagggaaagggacaggaaggctagggcctgacccagaagtggcaggatgaggctggggctgtggtgtgccaacggagagatagaggattgtcctgccacctggagagaggggattggccagaagagtgtccgggaagagaagacaaaaacagatttgtgtttcctgctttctgtgacagttgaaggtggggaagccccaactgggacttgattcttagcaaccaaaaatgccacctccttcatttcatggttggtgttttttttttctgccccttttagtataagagtgaggctttggctctcaggtaaagagtgaaagcaggaagtctgagacagacagtcccttattggcacaaagcccatgcagcatgcatcaccccatggttcttccccatttctcagcgataattgagtgtctgttttgtgccagatactgtgctggggtgaggcaggcagcagcagacagagtggttgggttctgttctttcgtggtgtttgcagtctttgggagcatgtagatgtgaaaccaataattgcacaaataattatgtacatctcatcacaggaagtgctgtggagagaaacggagagtaccatgagagtatgaaaaaatacagatctaacacagtgagggaggtttggggagcttccttgagagatcagtagaatgagcaggagtttgtcaggccatggtggtgggaaggaacagaaacggtggggaatgtgttcctggaggaaaccttgctattcagaggctcctttgggacaaaggttggcacttctgatgaaataaaagaaggcaagtacattaattagggtaggttaagctacaaatgtcagaaaacccaaaataacattggcttatataaaaaaaagagtttacatttgtttcctattaaaaaaaaaaaagcagttcagagctgatcccgtggctccatgttcatcaagtacccaggtggcttctcagttgctgtgccctcctcagcatgctgcttctgtctcatggccccaaaggcttgctctagtgctgcctgttacatccacattccaaccagcagtcagaaggaaatggcagaagaactgacctccttcccttcatacaggaagctgccagctgctagcgggattgggaaacatagctttcgttctgggtggctgtgtgtccagctggcacttgaagaaaggagaatgatggctatagggagacagtgagcacttctgtgcttcaccagaatggccaaaacacgggagcaagtgtccgaggaatgagagacggggccgtggcaggaagcagggccagatcttggagggccttgtaagtcacgttgaggttttggggcttcatctggacagcagagatggagtgataagtcttttaaagcagagaaaagcaggatcagacttgggtttttcagatcagtttggctgctctatagaagacattttggtggagataagaattaagagcatcttgcagtaatcagggaacgagagacgatggtgcccatggagatggagaggaggggtcagagttgagtggccagagagagaatccattgggtgaggagagggaaggggtgatgttggggcacctcccccaggttggtgccaggtgtacgtaggaagaggctggtgccatttacttagggagggaatgaaggaggaacaacaggcacgaggggtaaagatcctgagttctgcatgttgagattgggtgtccatgagacaaaagtagatggtgaaggagctgttgaatattcaggcctggagcttagaaaaagaagtatgggccaggcatggtggctcacgcctgtaatcccagcacttcaggaggccaacgcaggtggatcacatgaggccaggagttcgagaccagcctggccaatatgatgaaaccccatctctattgaaaatacaaaaattagctgggtgtgatggcgggcgcctgtaatcctagctacctgggaggctgaggcacgagaatcgcttgaacctggggagtggaggctgcagtgagctgagagcgcgtcactgccctctcgcctggacgacagagcgagactgtctcaaaaaaaaaaagaaaaagaaaaaaaaggagaaataagtaagtctgagatggcctggagtcatttctgtaaagagatgagagttgaacccatggatgtgtttgagaaaatctatggaaaaaggatagtgcactccaggaaggcctggcaggcattttacctggaaggcggcgatggaacagctggtggcagaagagcgtctctccaagatattcaaaggaaaacttcatacaatcacactgcctctttcctttcttggccagagaggcttgttttttacccaaaggaaaccctctcccctgattcctacactgtgtctgttctcttaggagaggactactctaccccatacttagagtttaacctacgtcctttagcctgggtgttttcacagggactttttgtcccctcccttaagtcttaatttttttcacttgtacattctgtaccccttgcaaacttatccagttatgtttttcaggataaaattcctagcgggaagttgctgggtcaaaggatgtgtaccttttgtggggccttggataccactgaaaaattataccaatttgctctctcagcagcagtgtgatgctggcacactttttgaggaaggtttcttaaggcatttctgggcttaattttttttataagcattgcctccctctcccaacttttctttaatgaaaagtttcaacatgtagagatgttgaaaccattgtacagggaacatttagattccacaattagcattttgcaatagttgctttatcaaatatctctccatctgtcaatccatcttattttttgggaggtatttcaaagtaagttacaaaacggtagatctcacccctaaatctatgaccacttttttattttcacagaaagtgttggcacagtagcccaggcattgggctggatgttcaccgtacaatgcttggtcaccctttccctctcctcacccagtggattctctccctggccacttaactctgtccccttctctccatctccacgggcaccatcatctctcttgccctgattactgcaaggccgggcacttcaggaccctgcctcctgagagagagagccgcaaggagggccaagtctgaagctttgggtgactggggcaaccttgaaacagttacttaagcacattgagcttactttgctttctttaaaatggggttagtgctgcttccttgcaatgtgtcagaaggatatgcagcacctagcattgcatagtgggcacttaataaatgggagcagtctctctctctctctctttttttttttttttttgagacagagttttgctcttgtcgcccaggctggagtgcaatggcgcgatcttggctcactgcaacctccgcctcccgggttcaagcgattcttctgcctcagcctcctgagtactaggattacaggtacacgccaccaagcccagctaatttttgtatttttagtagacacggggtttaccatgttggctaggctggtcttgaactcctgacctcaggtgatccacccgcttcggcctcctgaagtgctgggattaccggcatgagccaccgcactgggccgagcagtgtctcttattacgttgtatgctgaactgttaaagataccatttcttatatgaccctggggatggtggtagataattcctgattttttttttttgtctttttggtgtaaggatagtttaatcatatgttgtagctttttttctttttcaatcttggagggaaaaaaattctatgaggaacttcgaaaaccaaatactactctattgtgtcagatggtcaggaacacactgttgagtgtatttaaacgtcaagccaagtaagtctctgtatttttatttttattttctgagatagggtctcactctgtcacccaggctggagtacaatagtgtgatcacggcttactgcagcctggacttccctgggcttaggtgattctcccacctttgcctcccaagtagctgggactacaggtgtgcaccaccacaactgcttttatatacacacacacacacacacacacacatatacacatatatatacatatatgcatgcatatatgtatatatatgcgtgagtgtgtgtgtgtgtgtgtgtgtgtatatatatatatattttttttttttttgtagagatggggtttcatcatattgcacaggttgcttttgtactcctgggctcaagcgatccacctgccttggccttccaaagtgttggtgttacaggcatgagccattgcacctggcctccagtgggtctctgtaaagagtcgctgtcctgtcacttcatcagggtgtgccccatgcattgctttctcttttctttgaccttggactgactcatataaccaacccgtggctagagctctagcccttaaagagggtgtttgccctgttctggactctggcaaaacagagagcatagactctaaggcaagaagtgcacatcttcagcactgaaggcttcctggcactagttccctccctctttgggagtaccttattatttgatttgtttccattgagtttttgcccctgccccagtgtggaggtgagcagtatggtgatttaaggaagatcttaatgggtgatggtggcatcatgcagaggagggcagatcaaatagattgcaggcctttttgcagatgtgttttcagcctgttcagagctttgcacacatacaagaatggaactgaaaggcatttttatttgtgcttaatttgtgataattgtaaattcatggcaggaggctctgcaaccagttcagaagggtttcccagtgtgggtagctgtagccagtgtgtgtccccagaattgagtaggagtaggataatttcttgaagctctgggtgtgaagtataccagacatcccactgcggctgggaaagccggaggccaggagggcaggatgagggcagcagagggagcacctgcccatatggtttccccgcaccccgccaggggctccagggaatttacagtcagtacctcctgttgttgctctcgggacatcttccttcaccaccttatgctttctcagaaagcagctggccacagtccagagagtggcagtgactatttgagaaggcacatacttcatttcagaccagatagctattatcagcctagataatttctgtaagtcctgaaatagacttggcccaccaggcagggtgtctgcttctgggtgcagactggctggttctgaactttgtttgcaaccctggagggtacctttattatttagaagtcaggaagaacaaactggagtacattcaggcctttttcgtgggttctatctgggaggttgtggtgtagtgggcactgtttcagcccagtttcctgggtgattgaatggagacaatagcaccaagctcacagaagtgtgtgaggagtaagcatccagttccttcttcccctgggtatgtctctatcaatccagccaatgtgaaaggaggctgcagtgatgtcagggctgtagcagcctatttcccttattccctacagccaaatccaagtccctggaatggtgccctactcactgatctgagagggggcaattttttttaagctcaatgattcatttatacatttaacaaacgttttttgagcatctcatatatgccaggcactgcagatgaatgctgaggatacaaagatgagtacccacagccctcagagaggtcacattcgaccaataaagatggatgtgtacaccagtggctatcatgtaaatgcagtagtggagacaggcagatggattgcgggagggcagagaaagagagccttcctcagcttgagatgtttgttgtgggggcggagtgagagtggaagaggaatttgggtaaaggaagcaggcttgaatgaggacatggagttgggaaacatcctggtgtgtctggagacctttaaataagttgacgtggagtggggagggatgagacataggaaggggctagatcaagaagggcctcctgtgctctgtggtggagctcaggctttatttggtagggcagctattctgaagggacaggaacttcccacagagatgccaacggcaggcatttgctttgggaacacccgtaacattgagtgcctctaggttaggtggacagtgcctgtgtggaaggtggcatgcagagcttgagtcctcagactccgttcaggaaggtttgtaattgtctagggttggtaaagaagtagagatggagaggagtggatggatttaggatttaaggcttgactgattagaggaagagggaatgaagaagcaggaaccaagtatgaccagcactctactttttctatttgaggctctgctcagatcctacttcttttgggaggatttttctgacctctggcccaaattttgctgtacagctctggccctgatcgcctctacatgttacatcttgctctgtattgttcttaagtttgttttgctttccctaataaagggaagctctgaaaagataggatctgtatcttatacttttgttaagtgcaattttaggtatttaatattatttatgtatagtattattgggactttaagcaatttattttatctctgattttctaccaagagggaagaaggaattaaacacaaatgttaaatgggaagtgtcttctacccagaggaatgcattcatgacttgtgagtccaaaagggaatttaaaaaatcaaatacataccaaattatccaaaagaaatttaagagattgggattttagaagataggctagctttttggccacttagtcttggaacagtttacctggaaaggcatctctggtgggttggcagtggtttgatcacccttgcccctttggggcagaattaattgctgtttctgagtggcttgtgtttgtgattcccttggcaggtccagagcctggtgcactgtgtgaactgtcacctgtcagtgcctcccatcctgtccaggccttgatggagagcttcactgttttgtcaggctgtgccagcagaggcacaactgggctgccacaggaggtgcatgtcctgaatctccgcactgcaggccaggggcctggccagctacagagagaggtaggtgcaggtgtcagctctcagcccactgccactgagtctgcagagatgattttctggacagaagtccttttcttctcttctggggttcaacaaaagaagctcatgtatgaacataagagaacagatttaaaataccagctgctgtctggattgggcaactttaggatttctctgtctagagattggttggctctccccatttcctggccctccgtattggaaaaaaacgttcataagaatttcaacttttaggccaggcatggtgatggtgcacacctgtaatctcagcactttgagaggccaaggtgggaggatcgcatgagctcaggagttcaagaccagcctgggaaacatagcaagacctcatctctactaaaaataaaactaaaaaaaaaaaaaattagcagggtgtggtagttagcacatgtagtcccagctacttgggaggctgaagcaagaggattgcttgagcctgggaaatcgaggctggagtgagccgtgattgccattgcactccagcctgggagatagagcagaaccctgtttcaaaaataataataataatttcatcttttaaacatgattgtgagaaaccaaataaggtaccgttttctctgttgttgtgaaatgtctttcccatttcctcctgtgtcctctgtcttctttctttactttgtcatatgaacttattgcttctgcaggatgagtgaggggaaatgggaacactctggaataaagatggcggtactttgtacttgcctgaaaatccctgagcatagctccttatcactatctaggcagcttcccaaaggtggcggtgacattagcggagatggtgatgataaagatatatgctcatagttactcagcatttactctgccaaacactgttcgaagcactcatacagtaactccatgaatcctacaattatactcattttacaggtgacaaaacaggtgcagaaaacttatttgcgcaaggtcatcatcttcagagagaaatggcgtcctctttcctgtggctcaaaaatggcctagattgtgggtgaatggtcatcatttaagagtacagatttcccaacaagataacacagagtattctgtttttaagcttctgtgtgtcagaaatgttatcactcaggtattcgctctccagggagagagaaaccacaaaaaatcctgatcatagtgaagtataggaaaagtaatgcagaatggaatttatctttgagctttcttctggtcaagaaagttaatttccagagccacttgtttatgtgcctcagccaccccatccttttggggtggtaggaagaggagaagcacgagatgttaaggaaaagcaagctgattttaatctcatgaacgtgtgcagagttggctcatttcaaagacagatcatctaacctttccagcaacattggaaattattgttaatactcttggttgcttgccattgttgctgcaactcatatttcaggtcagatttctttatcccagtaatgtgcctttaattctgaactgatgggggagagtttgtggtgagagggaaaggaggagaggaggaaatgcagctcctatgaagcgttgctgactccagcaattctttagcagcgacaattactcattttatatatgcttctctcagaggaactcagagggaaaagaaagtccaagctgttacagaagcagcaacagcagaaaattcttgacgttaaattgtgcagtactgttgttgactctgaaaacaaattcgagtaagactactgaaacaagagaaaaatacctcgaggagtgacagcagagctctcctgcacttggttactatgttattcaaaatgggattcattttaggacctggcagtactgaggatacataacattagctggcatcagggacatagtgtgttcagtgaggaagaaaagaaagagggcctacaaagggtagtctcaaacttgtttaaaaacctgaacattattctctttcgatattagtatagtatatgtatgattttgggccagtgatttgaagatgtttctgagaatagacaacagacggacctttaagaattagatggttgtagttcaatactgtttgaaaacaagattttgggataactgatttttggagattccatctggctctgcgttgctcacatacggcagatctcagagtagtttgcatatacaaagtgagcatagaggataacatcagaatgagggtcaggacgagagaatgaaagattgtttgtggttggtaagatgggtgtgtataaggattaaatatcgctcactcttttgacatatgactatggagaacattcccgcagctatgcaaacagtttttaaaaatcatttgaaccacatgacccagcaattccactcttaggtatatacccgagagaagtgaaaacacatgtccacacaaagacttgtctgtgactgttcatggcagcattagtccaaaagtggaaaaacccaaattttcatcttctgatgaatgggtaaataaaatatggtatatccatacaatggagtgttactgagcagtaaaaaggatggcatactgataggtgctacagcatggatgaaccttgaaaatccactaaatgaaaaaagacagacacaaagaccacatatcatatgattccatgtatgtgaaatgttcaggatacagaaatttatagagacaaagtaaattagtcattgcttagggctagaggggaaagaaggaaatggaggttgactgctaaacgttacatgtttttttaaaaaagtggaggccgggcgaggtggctcacacctgtaatcccaacactttgggaggccgaggcaggtggatcacctgaggtcaggagtttgagactagcctagccaacatggtgaaaccccttctctactaaaaatacaaaaattagctggcatggtggcgggtgcctgtagtcgtagctacttgggaggctgaggcaggagaatgacttgaacccaggaggtggaggttgcagtgagccaagattgcgctgctgcactccagcctgagcaacagagtgagactccatctcaacaacaaaaaaaaaaggtggaggagatgacaaaaatgttctaaaattttaatggttgcacaattctgtgaatatactaaaaactgttgaattgtaatttaagtgggtgaattttatggtatgggaattgtatctcaatgaaactatttaaaaaaaccgtttgacctgctgacatgctaattagtctataaagtttacgttggctcaattcacttttaccaagattgcttactccttcaacttaaactcacctaatgctttttgttattttcaatggataacttggtttttgtagatatgtcatgatatggtctatgctaaaaataacagctgatctgttttgagggtaatagtaggagggccagaggcagcctttgtgcagtctctaccaattttttttttttttttttttttttgagacagagtcttgctgtgtcacccaggctggagcacagttgtgtgatcttggctcactgcaacctccacctcccgggttcaagcaattctcatgcctcagccacctgagtagctgggattacaggcatatgccaccgtgcccggctaattttttatatttttagtagaaatggagtttcatcatgttggccagtctggtctcaaactcctggcctcaagtgatccgtccgcctcagactcccagagtgctgggattacaggtgtgagccacctcacctggcctctaccaaatattaaaggcaaatatttttcaaaatgaaataagtgccgttacttacaaattagcaaaacaattaccgtgctggctccaagctgtaattgactatgactgaagactggagtagttggttttcatgatgtcatccttaaatgtgagggaattactaaatcagccccatttccccttggcttgttattggtgcaagatcagtatcaagatctattataaatcaccccatatctaatattttactattaataaattcctacctcccaggtgccttaaagttcttcagctggggagagatttttaattttcctgtgtagaggcggtgacagagcctacacccaaaagtagtaactgcagcaggttgacaagatttagggagacagtaacgcttaagttggatgaacagttttataggccagcagagaatttgtatcagaaacacacttgttacaacagtacataaaaagccctcagtaccaaagcaatgttttgtcatcggcctccctgctgggttctcctcgggtcagagtagacctattgtatttttcatctgagaacacacctctcatttgtaatcattggtttcggaaacaacagccttggaagcgaacaggaaactggaaaatgactttctggcaacagaggacagcagaagagcataaacaatgctgagagatcagatttatcttttagagcaagtgaggaccagtgtcatggtttccatccccatgaaaaccagctcctagtaccctctgactttgaagtaaaatgcagccgcccccttgtgtcggactcccgagtttaattgctcagggcgtttcctgattcctgagaggggttacagcaccattagaggcttgtttacagtaacatactttcattagttgctggaatggcaacaattttgtttcctatcatctaatttttacttgtgacctgcttttatgtggtggtgtgtcttttctatttctgacctatctaattgcttgcttattatgaaaagctgctgaggataagtcccaagttagccattacatatgtgtagaaaagatatggacatttaaatttatgcatttgttttgacattaaaggagcaatgggcgtgccagtgcctggctgtaggggtggagtggggatcaggaggctccattaccatgggaaaggggccaggtttaataacttcacccgtcaaaaagctcataaccctatgagcttctctgcctcattccaaaagaggatttgggatgagcctccagcaacaggcataccaacagtgtaagcagaaatacagaatgaggaccaagggaaaaagaagggtgcagcttgcgagccatttgggtttatgtggttggtatgattgtgtttgaaatttggctccaggctttttggcaggcacagacaaatgggatgtgtggttaatcacacatgtggctccaagtcacttttactttgtaccttctctgaggattggcataaagctgtcccttttttggttctttttgagggcaggaaagaccacagtggggagaaagagaaggaagtaaacactgtcaagtgctaactgctcgacttgcctcttaacagctctcacatcccccaaatgacaatactagcagccgtagtggtgaagactgcgtgtctcctgtgggccagccacctgccaggcacttgtttggttctgccagtcttgtcgtcagcctgaaagggaggcttggtggtcactgtttttgcagaagaggatgcttgggcttagggaggttatacaaccagatggtgagttgtggagccagcccccgagttgtgtctgttggattctacagtgcaagctgcaagcttttcccatactccagctagttgtcctttccttttagctcttacttggttctgggctacagaacctgctagtctgctgagtctgctttgttagacagccagcaagtaggtctgttagtgagggtttgggttctgtgcataggtttgtaataactctttgcagtgcttggagtcctttttgattcccttccttgcagctttggggcagtattaagttggtctgtgtgtggcagtgtctctttttttccctttcatggtttaggattatcacaccacatgtcagtaattataaaatgcagggctgagctcaggagccattgtgctctatgtggctgctaatccccatgctaaatggcaccaccaaggggccttttatgttcttgtctgttttcatagttaaacattccccccacccccaggccttcagctgtgttcacacaaatagctcacctgtcctctgcttataatttactacgtcttgtatccaaacttgttttaactgtgtggtaagagagaactagcatattaactgactcttcttgctaagaatgatatgcaagagcttcagtattcagacttcgccatctgatttgacatctttttgcttacattggggaatttggcaattcaaagattgaccattttggagatctttatctacctacctacctatctatatgtaatccttccccatttccacaatattaatacacgaacaccttttctctttttccccctcgattatcgagattcagataatacagtgcttggggaggagtgggtgtgccttgcccaacaccactaaaagaactgatacaaaatctcaaggctgggttttgggagagtacatatgtgagagcaaaaacattaaactagctacattcttttctctatctggggcattttttaccctgctgctattcataaatgacttcctaatgcagtcctgtgcatatgcagaaaaaacaaaaaacccagggctatttatgtttgagataccttttatgtggtatgtactaagcaagtgtcaaaggaaacccctcacacacagacactgtatatcagtgaaatttggtttctaaacaaatacattccgcatataagcactgcctggtgtttgtttaaaaggaagctgttctggaaatcacccagcttgacagggaagattacctctgaaatggtcatttagttttccaccagtccttaacagatactgtcatgcattgcttcatgacagagacacattcagagaaatgtgttgttaggggattgtgttgtgcaaacatcatagtgtaggtacacaaacctagatggtatgtcctactacgcacctcggccatatggtatatatagcccatggctactaggctacaaatgtgcacagcatgttactatgctgaatattgtaggcaattgtaacacaatggtaagaatttgtgtacctaaacatgcctaaatgtcaaaaaggtacaggaaaattatggtactataatcttatgagaccaccgttgtatatgtggtcccttgttgattgaaacattgttatgtggcccatgcctgtactatttctctctctctctcttttttctctgtctctccccacctgcccatttcctctctcctttcttcccttccccatttatttgagtattactatagaaatcatttcattacctacaaaggcaactgaatctgtctgtccacataggattggagggcctgaatgaataggacactcatattatataaaaagagttactcctttacttgaagacactcaatgcaatttaaacaatgacaccctgctaggtcgtgtgaaggtgccagtccaggcctggaaaggggagcagggttagggacagcaaggcaatgcatctgctagctgtcacaacagaggacaatgcaagcgagagctggcactggtcacactagtcaaggatgatgtctaacactttggggcaagatgttcaatctaaaattccagctaactctccaataggaactctccaaaaatgcagtcttggacttttagaaaaagtgaaagcagaaatcagagaggtaatagcaaacaccggggtttaggaaacaaaccaggacacaaggctaagctaagaagttaaaacgttcctaccaagatgcaggttggtcacgtcacttaaatcctgtcattcgtcacagtaatatccagatgctgtaaagttgccccaggaaagtacagcccctgccccggcagagggactgagcctggttggactcggcctttttagaatgaggtaatgccgatttatgttctatgctggctggacagattgtaaaaacctgtcattattgcctcttcccccagatagagactgccttgacaccccctttttttttcgagacgagtctcactctgtcgcctaggctggagtgcagtggcacgatcttggctcactgcaacctccgcctcttgggttcaagagattctcctgccttagcctcctgagtagctgggactacaggcatacgccaccatgcccagctaatttttgtatttttagtagagttttagtagagacggggtttcaccatgttggccaggatggcctcgatctcttgaccttgtgatccgtcagcctcggcttcccaaagtgctgggattacaggcgtgagccaccgtgcccagctgaccccttttaaaatttgtccagcagcagcattttccaaccagtatggtgttttgtctttatggaggttagggttagaaccctgacctgtactactgttgccatggtaactgcccttggctttaaaaaaagaattatataatttcctgaaagtgttgttagacaatgtttttacaagagcactctctgcatttaaaaatgtgacattttgctcttagaacttttgggagagtattaaaaaaaagcaatagacccaagtcaggagcagctctgcaaatctgagatgcagatgtgctgattgggcaaaggcccagtgcatgcgtgtgcagcgtctccagttttccagcttgagccttctccttgccattgcttatctgcttcttgacattctgtttgagagtaaaaggaaacttaactgctaatcgctgatttaaatacttaaactctgcagaagtatttattgcattgacttcaatcactccttccacggtattttctaaatatttctgtgtaagtttagacacgtttaattatttcacttttctttcttccacgatgaagaggccatgtatgacttggcccctctgatgcctcaggtcagcttatttctcttttccttcccctgctccactggaatgagtgaacatctgtacgtccttctttcccttcttccctctctgtggcctgagctaatctctggggagaccctgatgatgcccctttgaacaactcaagggctgctaggactagagggtccctggggtccacctagccctaataccttaggggaaccaggccagagggtgtagcggtgacatgttcactattaaccaagaacttggtgctagcactggactagcccctcggggcaccaacttctgttgcagagctgcctctacacatctgcctgccccactcttgctcctccccagcttatgaagcctccagtgctgtcaagcactccctttctggcacctccctcttggtttcctggttctcattctaccattccatctgtttttctgtttctttctcagctgctcactctttcttcttggggtttttttttttttccccgtgagacagggtctggctctgtcgcccaggctggagtatagtggtgcgatctcagcttactgcaacctcaagcgattctcccatctcagcctcttgagtagctgggactataggcgcacaccaccacgcccggctaatttttgtatttttttcaccatgttggtctcaaactcctgagctcaagtgatccactcgccttggactcccaaagtgctgagcttacaggcgtgagccagtgtgcctaacctcgggggttcttgactgaggcatagcccttggctttctgttttcctctgtctcctctccctgaggtggcttgtctggtcttaggattttgcttgtcacttccttgcttacaactccaaaaactctgcctgggcttctccagtggaactacagtcagatggctgaagcatcccggctcttgggtcccatcttgagctgccaggtgcctcagatatggactggaggagtggctgtcactgtggttcgctcccatgttagatacagggctagtctcagctctgccactccccatgtgtgaccctgggtgagttacttaattccctaagccctgtttcctcatctgtaaaatggagatgttaatagcacttttttttttttaattattactttttgtgagatggcgtctcgctctgtcaccaggctggagtgcagtggcgtgacctcggctcactgcaacctccgcctcctgggttcaagcgattctcttgcctcagcctcctgagtagctgggaccataggcatgtgccaccacgcccagctaatttttgtatttttagtagagacggagtttcaccatgttggccaggatggtctcaatctcttgacctcgtgatctgcctgtctcagcctcccaaagtgcggggattataggcgtgagccactgtgcccagctagtagcacttctttagagggttcactgaccattgagaaatgtctctgtggcacttagggccggtataggtacagtcaactgctagctaacagtaatttttattctctctaaaatagaatttaagaaccctcccaggccagttctcctgaccctagtgctggcttttcaatctggcttccctgacccatcaatgtcaccagtaccatccatcttggaacttttgaaccatcttgtatttactcatcctctttttttttgtctttttttttggagacacagtcttgctctgtcacccaggctggagtgcattggcgcgatcttggttgactgcaacctccgcctcccgagttcaagcaattctcctgcctcagcctcccaggtagctgggattacaggcacccgccactacacctggctaatttttgtatttttagtagagatggggtttcaccatgttggccaggctggtcttgaactcctggcctcaagtgatccatccatctcagcctcccaaagtgctgggattagaggtgtgagccaccacacctggcctgcccattctctttaaaccctatatttggccaatcaccacattttattgacatttcctctgcaattgcccttgaatttctctgtttttctccacttaccctggagcctccttaactggtctcctgggactggcctcttcagctttagaccctgattctttctgtctagcttgtgaacctcttcataaaaccaaacttctctaaataatgctctcataatgaatttgtttattcattcacaggcctgttcaatgaatcactattaagaacccactgtgtgctaggtaggtgctctgccagattcttactcatttttatgtctttagcacctattagagttgagagagaatgaatttaatgaaacatgacaaataatatgactaatatattttaaaaatttgcagaaggccagctgtggtggctcacgcctgtaatctcagcactttgggaggctgaggcgggcagatcgcttgagcttaggagttcaagaccagcctgggcaatatggcaaaaccctgtttctatcaaaaatacaaacagccaggcatagtagtgtgcacctgtggtcccagctatttgggaggctgaggcaggaggatcacttgagcccgaaggttgaggctgcagtgaaccacgatcgcgccactgcactccaacctgggagacagagcgagacgctgtctaaaaaaaaaaaaaaaaaagtacagaagcccaacaaagggtgtgttcattctctctggaagtgagggaaggattcccagaagaaagaacatttgacggagggcttaaaagtcaaattagtgttgttgagccaagggatgggaggactcaatatacacagagtgggcgccaggtgtggaggaaagttcttcacctacacggtgtggctggtggacagatcaagggtgctaggcaggactgaattctgcctgctgcctgtttgtgtttttaaaatagctttaatgagatataatttacgtaccataaagtttacctgtttaaagtgtacaagtcagtggtttttagtatatttatagaaatgtgcaaccagtggcccataatctaattttacaacatttccatcaccctaagaagaaaccttgtatctattaacagtcactctcccattccctgtgtgtgccccccacgacccggcactagcccaaggtagccactaatctactttctagatttatctgttctgcacattcatatgaatgggatcatgcaatatgtatcttttgtgtctagcttctttcacttagcgtaaagcacttgaggttcctcgatgttgtagcatgtatcagttgtttcattcctttttattcctgggtagttttcattgtgtggctataccatgttttgttaatgcattcatcagtccgatgcctgtttttaaagttttattagttttaaagccacacccatttgataatatgttgtctatggctgccttctcactactgtggcagagttgagtattgtgtcagagacctgcatggcctgcaaagctttaaatagttactattcagccctttgcaggaagagcttggcaattcctgtaatagaggatgaagacaatgaagggggtaggctggggctgagtggaagatgagactggaaaggccacgtaaggatttggacttaatcctgtggatcggcttctcaaagtgtgtgtgctgtgtgaagcccctgcatcggatcccttgatgtatagattcctgagcctccccctgggcttaccagctaaaccccttgccccacgcccttattcttaattccacctggacttctttcttcagtctctcaattcttgccactttggaagcccatgcttaggtcttagctcttcaccaaacccttgcctgattgctttaccctcctccatttctttcttttctaaacatcgctctgaatcttcttccccctaccacaacctgtgccttcccacagtatggaattatatgttttattgtattacttgctgctgaatcgtgtgtgttaattctgcacactcagctggtgagtggactgctttcgggcaggaactaggtcttgggtctttttttgcattatgcaaattgggttattgcatggcaccaaggatgttatttagagtataactgaaagtcttcttaaatgactttccttttgcatagtgcatctttatttgctttgcattctattagtggacttagtgtttggtccctaggcccctcaacattggagctaagcaggtgtcctccattttgtatgactgctttgatttacttttttaattaaatctcttttaattaatcttattttttactctaaactgcagatctttgttcagtcttttccctagcccatttctaaatctttgttacattcttctttactctgaggggttttagtcatctgctagtaaactagttagtcctttccgtcagctgggtaaaaagctataaatggttttcaactctatgcagctcccttgggttgctcatttgatctgagccaggtttgaagttgggccattgagaatgatctgtcctcatgatgtagggggtgactccagccaattcttaatattgctggaattaattaactttgattcctctaactgaaagagggcattttactctaccgtgtattattaaataccttataacttgatttttttgattttgttttcttgctcagtgagtacttaaaatatccctgccgatatagtaatttgttccctgtttaatatggctttttcctttgtttactctggactcaagtctttgtagcttgttttctaagtcagctcaaaagttgctggtcattggatttggcagccttttcaagctttacccaccagaatcctacaggaagttgtgtgtcggccagaagagtctgtttatttagagcgtggtgtccagcagaagcaatccatttatgagggtctggtcttaaagacacaggcatctgagtctgtgtttggaagacctgctgctttggcttccattgcagccatgttctccatgctttcctgtccagcccgccggggcacctcagtggcactgctggctgattgaaggagtccttgtctctgagctccttggccttgtctgaaaggctgaaatatcaaggcccagatattagacagggttctagtccaaagcaccctacaataatgctttgtatttatggctttttttttccacctgaaccacagagtccttcagctgaacctgaaatttgtacaactcttggaggatgaggggcaaattacaggtatgacttggatacttttgaagataagagagctaatgagatgaggtgttactgattctcactgtgaagcaaggacagagcccagctttaggatccaaggtcactaccatagcctaactcttgcccggagctgaagtgtccccttgtgcccattatggcttaacttctatttgttgatacatgtgtacacacatctgatccattttgaatttgctccagcaagtcggtgatgtggctgtcggttctctgtgcctagcactgggcttgccacaggttagggactgcatgcctgtggacccgtttacgtggaagctgcatcgatgtcttcttaaaaggtgagtccccctcccagagtgaggtgtggcctcactaccagtgatgtgagcacataccgaggtgccttgggggagaggggcagagaggtatagcaactgctgagaggcctgagcacaaaaggtcgaaagtgagctgtcgtacctctcagccctcgccatgcccctggggtcttttaatgacctacagttggattttttcatgaggtggaagttatattgaaatttctgcctcagaatagttcctgaagagcattgactctctgggagtcttaggtaaatttaacacttaatgaaggtaaaaacaatcctttccacattcctctgctcctcctctcaacctcaggtcagtcgatgtgcaagcagtgctttccttgggaggcagcagtttctgaaggtaaaggagaaagccctggtccaagggagccaaaggtccgttgggacacacatgattccgtgttgggcacatgggcatgtaggtgtctcctagccttgccaagctgtcttaaattcgggcatcttccaaaatcaaaggcaactgaagagcttaatttccaatgatgatacattttgcctcagtcatctggccccaaaagacttctgggggccgatcaccctcccttctattctgaacgccctcatcccctagattgtcacttggtgcttttggccagggggctctgcttcttccttgctgcgagttcttcctgctgagcccagcatccccgtgagggctttcacgcaggcccttcattgctctcggtatgttgtcagcccatgtgttgcagtttatttttgattcctgctttcataaggtttgaagattccactcatttttccagtggttgttaagatagtgagaatctaaatgaaatggtaatattaccattgtgaacaattatttttctaaaagaatcttttgtgttcatttttaatgctgttaagatctaattcccagtattttatttggaagctcttcaaatttcccaaatcataaaatctttcaaagcctactccaagttactttttcttgattcagctctcctatttgcatttaaaataaaaaggccagcctatttccaaatatggaaatgatctatgtttattagagatcagcaaagtgatatgggcccttgacttgctgtgaggttttttttttaaatgtgttttagagcaatgtacaagggcaatttttcgtcctgttttgtcatgtgttcttaaatacatttcctaaacactttctctggcttggtgctattactgtgtatacgtcctacatatgtttcctattttttatgactcatacttacggtactcataaagatttatcctttatcttggctctgagtaatgagcccacttgcacatttccagcagaactgtgggttagggattttacatttcattctgctggagaggcctctggaaggcatagcacaggcagcgcagcatgttccttgtaggcagtactcacttctccctgagggaacagttagctcagtttttgtgaatttactaatttttgttctctagcttttcctttccctttgccctttttagccattttgctgtttgagtgaggccacacaagagcatgaacagatgaaacaaatgctctactcctttttgctgctgagtaactgtggtggaggaagaaatggaaataatgaactgaaacgatattattacatgtggcaacaaactcaggcaaggagtcttcttgggtccaaataaacattcagacccatgagactatcataggccatgggtggcttcattatacttaaaagggtataggacaaggaccacagcttacggcatggcagcaaggcattcctccttgttgtgtgccttgtgactgttcacacatcagttcatcagttcacatagccatccagagctctccagctgatggctcaaatgccaggagatgagatctctgtgtgtgtgtgtgtgtgtgtgtgtgtgtgtgtgtgtgtgtgtgtgtgtagttctctagtttaaaagccttaggaaggccgggtgcagtggctcacacctgtaatcccagcactttgggaggctgaggcgggtgggttacctgaggtcaggagttcgagaccagcctaaccaaaatggtgaaacccgtctctactaaaaatacaaaattagccaggcatggtgacgcatgcctgtattctcagctacttgggaggctgaggcaggagaatcgcttgagcccgggaggcagaggttgcagtgagccaatatcatgccattgcactccagcctgggcaacaagagtgaaactccatgtcagaaaaaaaaaaaaaaaaaaaaaaagccttagacccttgcgggaactagtaggcaactatgtaggaatagttttcatggtactctgtctcataaatatgccccatttacaagaatcactgctctcagggaagcccccagatgtcacttcttatcagatgtcttaaaattttccagtcccaatagcaagctgccttgtgttataattgacatattgtcttaccagattaccagggttacagaattgagagagttaacagaagatcaaattctcatgtaaaagggaaaagctttgctcactgtttatccacacctgtacgttttattgtttttatttgtggtattcctgactgtgataggctaaataatggcccccaaagatatatccacgttctaacccctaaacctgggaatgttgcctttatatagaaaaagccttagcaggtgtgattaaattaagaattgtgagatggaggattatcctggattatctggtggcccctaaatacagtcacatgtatccttataagacagggatttgatgacacagacaaaagggaagactgtgtgaccatgcaggcagagattggtggtctggaacccacaagccaaagaatgccagcagccacgagaacctgaaagaggctgggaacaggttctctcctggagcctctggagggcatgtggctctgctgacaccttggttttggcctagcaatgctgattttggacttctggcctccagaactgtgagagaatagccttctgttgttctaagccacccagtttatggtaatttgttacagcagtatgggaaatgagcacacactcacattagtttgagttccatgctccctcctgtctccagtttgtttactcctgtgttccccagctctgtaaaggacgctaccacacagttgccagggccacagtccttggcattattatccatgacttcctgtgtttgctcagatgtcatatccaatcctatttgttctaccctaagaccatattctgaatctgcccacttctgaccaccaccttcggtctgacccaccatcacatttttacttgagaggcagtgggcctctggcccatccctcttaggagtgcaagatctggggtagagcgccagtgttggaagcctggctacactgctcatgagctgtggggctttgggcaagtcagttaacttctttatgcttcattttcctcatgtgggcataatcatagtatctacttcatagagttgctgtgacgattaaataattaaagcatgactggtgcttagaacagtgcgtggaatatcatcagcactccataaatgtcagctgctatcattgttagcaattaagatctattctctaagtggcagccagcatgatcttttgaaagacttccgtccagtcacgaagttcaccagttcagcttcctgccatggttttttacatttcaatgaaaatgcgcaatccccaccagagccctgaatgatcttttcccccttctcccagcactctcaccattgctcactgtgctgcagtgggccctgacatcttgcctcctgtccttggcatgggctctttgttttgcctgaagtacttctcccagttactcatgtggctgccttcacccagtccctgctttgccattacctccactgagaggccttcattgaccaccccatttaaaatagtcatagcaccccacaacagacacactctcttttactgttttactttaaaatgtaacttatattaccacctgatatttatttttaaatatgttcactgtctatctcttctgctagtatatcatcagtatagatgttttatctttagttggtattgccaggaattagaacagtgcccactacatagtaagcagtcaagaaacatttgtgaaataaacatttgcatgaataaataagtatgttgatgtagcagtttagcaaataggttaagtctagaaattctatatatggaagtttctcattaattatattttttgaagatctagttattgatattggtatgtatggcttgggcataaagtaatgtttcttaaaccaaggcttcaaggtatagaagacagcactggattgtgagtcttaataaaagacttccctcttttttggtcttccctctgttgtgatcttttttgtttaaacttgagggcaaatgtgtagacccatttggatctcagtttctttttttattttctgtcaatataaagacattgagaaaattaatatttcaaaataccaattgagaattagagtcaaaagcatttctggagttgttaaactacaaaatatccttaaagaaaccctcagcattcagtgaataaggaaccacctaagagctgaaatgtaaactaagggtgtctcatgtcttcttatgtgtgttttttttttttttttaacctagattaagtaggatttacagatctgggggcagatctggtctctgaatacttgggaaaatgcttttgagtttcattgcttatatcttactgccttgcacagtaaaaatttcatgattttccaaagagctctactgtttcgtcaggacagagtacatgtgaatctttccctgtctttcttttatttattgaaatgcagaagattagaagaactaattatttcagtttgttgagtggaggcctctctccacataaattagaaccaggcagttggacagtcagctgcagctgcctttgtgaactgggcaccggtgcaaagcattgcaggagtgaggagacaggcagccctcggagctcacggtcaccgtgcatccagggacaaagagcaacacctgtaacagaaagtacggagacgtagaaacatctcatcgccctaaatacacgagatagaaacttaaccaaatagatgtaatcaactacagctgggctgagataaacacgttaagtgctaagtaatcaggcatgttagggggatgtggggctggggctagggctggggctagagctggggttggggctggggctgggggaaggcattgctggaataattggagccaggtgtgcttgcctggtgctgctttttggaggtgagaaattggaaaggtttgaaatggggatgtggtttggcagagggctgaaaggagaattttccaagactaggggaggagactggtaaataaaatagagccgagttgagtatgaaatatgttgaggacagcaagtaccttggcagctgtgaaagcttcatctgatggttttgcctgttggtgttgatgctgggagaatggtcttcagctgaacaccacaggtcttcaaagccaggtgaattgtgacagcctgtgacactggaaggggcagtgtagacaggcctctgaagataaatgtttgtccccagatttccccactacagattgggagaaacctctagctttacctcacaatccagtgatgtcagctgccttggaagcagttccttgctttggcacttcctatgttcctatttttttggaaggtacctgccagggaggaaaggcagcgagcacaggtgattgagtttttgttcagagatttggggtaacctcagagtagatgtggtgttggggtcaggtgtggaatgaatgtggtcttcccaggacctttgtttgttagattcagaagtctccagaactacggtgagatttggggagcaaaacctgagcttgtccaggttagtggtgcctgaacaggaacaactagcaaagatgttgatgtttgtgctacctttcggccctcgtctttaatgagctccaaatcccaaaggtgaaggaaaagcagacaaatgacagaacaaccattagttcctcatgaggaagccaagtgtttggagggtcatgtatgcagctgccaccaatttgtcaccctgcttgaaaatccagggacctgtaggcaggaggtaatggcactacactgatcagagccaaagtcaaacgctggtaggcttctttccagagaattacaaaacctggcattttatttgtttttttcaacacccctggaagggagattctgttagctctgttttacaggtgtggaaattgaggctaagagaggttaagtattctacccaaggtcatgagctgggaaataattggtagaacctaaccttgaattcacaacacacttcctatagatggagttgacatgcactctgagtggctctgggcaaggtgggctttcccaaggcttaggcatttattcaataatgaaatcattatttattaagcacctgtttgtaatgtgtcaggcacagtgccaggcactggcagtcctgaccccctacccttgagaatttgccaaaggtaacaaaaacacagtggatagtgagttctcccttgctcccgctcccatttagatgatctcaagctctttactttgcttaaatgtgggcttagatgttgcacccagtgttgcgtgttgacttaatcatatgcaggtaagtctttgagctgcaatgaaacagccatcaggtaagagttaaatgtgaatagctgggctgtcatctataggtgaagagcttagaaagaggggcaggttagggcaccctgttattaacatcagctctgttctatacaaacaattctcttactggattacctgtgccaaaatattgctgaatagcttggaaacaggttagtattttgccctttagcaaaacagacaaaagaaagaccatggagttgaatttggaaaggaatcttggaaaatgaatgtttcagtacaacaatgtatcattcacatgcccagaaattcagcactgcagggctcctgctggcagaatcaggtgaactctgggatgcattctgatttggtcttgaattcttgcatgtcttgagtaggttgaaagttggttatttttgttttgctggcagtggcctttacttagaagtgcccaggagatattcttgggatagatgccaacaggctttgtgtcttttcccttcaattttataaaaatgtaaatgaaaggatttcccagcaccaagttgtggagctacctgggtattcaagtgacaggaagagttggttgttagggtggttaggaagggcttcttagaggaagcgtgcttgaactgagacctgaatggtgaaaaggcgtgaactatgccgagatctgggtgaagaagaggccaaataaagggcccaggccctcagcttggaagcagcttgttggagatgagagaggggccagtatggctggagtggagttagcaagggggagagtggtgggaggtgcgattggtcattgagggttggatcacgtggggccctgcggagtaagaagttgtttcttggcatttctttacatttctgtgttcttatctagtgattaaaagagctgaccctaaattctgaagacttggggagtccgtgtttgctaacaacggagaattggttctataaggagaaatgcgaatagttccactggcaagggaagtagaaactagattactagagtggatatttgggctctagtcccaaccatgccataaccagctacagaacttgggcaactcatgacctctttgggcttcaatttccttatctataacaaacatttggagtagaatgtctgtaaaatctcctttctcactagaagtcaatgattttattatatataaatttcatttttggttttatccttttgtttctttcagacttttaccagtgatcttacagtaaccaagtccactcactagttctgatttcactcttttctctattcctttgcttctggagtagccagtgaagtacttggaaaaaaaaatgtcaggagggaaagagagaatttcataactttgcacagtgtactcaacagtgcatatttaacacattgcctgttgccctgaaagaattcccaatcaccgcatgagtcgattgtgatgaccgagacttgttctcagactagtgatgtagggtttaaccaaaaaatgccattgtccttactgaggaggatttatcccatcaaaacggcatttgagaacctgacagtgggatactgttgtttgcatttactcttttttttaaatcatattttgatttattggaaacttatatttcaataaaaaaaacctgctcatctttcagtatcaattatacaactctctcattgaaaagtatatctaggccgggcgcagtggcttacgcctataatcctagcactttgggaggccgaggtgggtggatcacttgaggccaggagtttgggaccagcttgagaacatagtgaaaccccatctctactaaaaatacaaaaattagcctggctggtggcgcacgtctgtactcccagctatttgggaggttgaggcgggagaatcacttgcacctgggaagcagaggttgcagtgagccgagatcgtgccactgcattccagcctgggtgacagagtgagactctcaaaaaaaaaaagaaaagtatatctaaaagaaattagcaagaccaagtatattaacttgtttttagactactaccatgtcaacacttcctattttaaaatgcactgtaaatcatggtttacccttaggattagctttgagtatttcattatttgttttgcttctgccaaatgtaaaagactaagtgggcacactgacccagaattaaagttaaggaaagcaaagaaactctctaaaacaaacattatttaatttttcaagccagcatttcaagacattttcacttgttgaaaggagaaagcacttctattttgttctctagtattcactttggcaggctaaactaaactttttaaaattgttccttttaattgagtacacagatcattttagtgtgacatggcatttatgaaattgataattcagtcacatcaactcatttattgagatacattcatttctagagatcttttgttttttgagatggagtcttgctctgttgcccagactggagtgcagtggcgcgatctcggctcaccgcaacctctgcctcctgcattcatgcaattctccctgcctcagcctcctgattagctgagattacaggcgcctgccaccaagcctaactaatttttgtattttttagtagagacggggtttcaccatattggccaggctggtcttgaactcctgacttcaggtgatctgcccgccttggcctcccaaattgctgggataatgctcatgagccactgtgcctggcctagagatctgtcctgaagacttttactgactctattagttgctgaaagaaccataggctctagatttataggtggccatagagatagagtctaaccttttcatttatggggagactgaagcccaaagtaagatacttaagccaaaaaaaaaaaaatcatttatttatttatttttattatttttagagacaaagtttcactatgttggccaggctggtctcaaactcttgtcctcaagtgatctgtccgcctcagcctcccagagtgctgggattacaggcctgagctactgtgcctaaccccctttttaaaatgaatgatatgtcaggatcttacattaggaggaaggcaaaattggggagcaccggggtttgtggtttatagtgaaagttaatttcctctgtttctcagacaattaactttttttctccttgagggcaaacaacaaatgattattttctagaaatcagacaatcctatttttgttctaaaatttcatgccaacaatttacttactttcttctttgaaaagaatgagagagattctgacctaaaattgtctgaaatgtgtactgaagatgctaatattgtattggtaggtcttgccaagatttaagagggcatctcagaaagacattgtacaccattctacaatggtaacttgttttcaccttagagatgataaagtagagggatagataagaggcttaattcagctcatttcttacacagtagagaattatggatagaacttacagacttttacataaaataatgtaaccaggaccagaattaccaggccctataagttgttccttatagaaatgctcaaggctcctagctcagttgcttaattcattgatagtttatggttataccccaaactcaacaagtgtttattgagggactatgacctggggacaaagccaaggaacaaactcctcaagtctaggagatttagggttgagggctagagtttgatttttctcaccatgcaagatattccttggtaattcagcaacaatctaaaggtaccctttagatcctaaacaaaaatgggatttaaaattgttattagatttatgaatgatatgttttcttttgggcaagtaagtcaggtaatggaagttcatttagtgaatcagtgcagtaatgtggttaactaagtgacacttactaagccagaagttaatgtactcattatctatcaggaagcaaatcagggtctatgtctctgaaaagcaaatgatcgtctttcattaactggttaagcttggctttcaaggctcattgtgatctggctccagtaccctttcaacgacattcttctttattcttttttgtatttccttagctccgtctgaattaagtattcttcacacccactcatgctgcctccactgcccttctccttgtctggaccccttagatccacctttccccattcaccctctggcccagctgaagtgcccccttcctgctgcccacagatgtgtttgtatctgcctgtccctctgcccccatcaaactgtgagcttcttgagggcaggtattgtgtctgactcacatttgaagtcctttcattacttagtggtgcttcccaaatataagtttatatgtgctattagtcttcacagtttgtgtagtattcatatattatttgcattatttaccttttttttttttttttttgagacagagtcttgctctgtcacccaggctggagtgcagtggcacgatctcggctcactgcaagctccgcctcccatgttcatgccattctcctgcctcagcctcctgagtagctgggactacaggtgcccgccaccacgcccggctaatttttttgtattttttagtagagacggggtttcaccgtgttagccaagatggtcttgacctcctgacctcaggatccatccacctcggccttccaaagtgctgggattacagacgtgagccaccgtgtccggcccataatattttttcttaaatctactcacttaaaaaatgactttagcttcatcctcaacttcctaaacatgaaatcatgtttttaattcctgtaaaaatatatatacataaagtatatcttaaaacattcttattatctccacactttgggaaggattgactgagtaaagtgctttacacatagtagccattcagtttctgaggaatgaatagtaaatgcgcaaaacataacatgagaacctcttttccctgttagtttagtaacttcacgcttattaacctagagataaaaggaggagggtgcagctagaaaagactgagcaagcccgtaagccaagccattcattcctgtctgtgaagcatttaggtgttagatattactaattacctcttatgcattgcaaactgctgggctagaggggcctatggaacaataaattttgtggattgcagagtccctgctgacttactgagtgagcctctgctgaaactccagaaattgtgtaagtggaccccttccccacaaaagattcagaaagcagcgcactatacatgggacacatcctagagaaaaggggtgtggtaagtatgtgtacacatcacatggttgttgttgtatttctcagtgttcctgtttggggcagtttaagttacagatttctcactaccactaagtgttttttaggaatgcattgtgtactgccaacataacagaggtctgaaggatttttctataaatttgctaatgggaattgtatattttttaacctaatttttgaggatattgtaagattactcaggtagaccaatttgagtttctttaaaaagaacaagttcctatatattcaagctatagttaacatagttaataattaaattaatcatactaataaatattgaagcctcttataaatccatgaagagatttctgttttagttactatactctatatttgctgcttctatagagtgtagaaatagtatgctgtagtttcttatttattatgtaaactgcagtatagatttagggtggcagatcagagactagaacaggtgatttttttcaattggtgtttaataaagtttaggtaattttttcttaaatctgtaggaatcagtctatgtaagttcagcatgggataaagtctatttagggttttatgagaaaaatcacccactcttttttttttttttaatccagggttgggatcaacagttgttctagcatgggcagggtaacttgatataatggcatacatttttaccctggtctgctcttagagcaaatttgaaatggttgttttggaaaatgtgctatgagtttctctccagacctttgcaccagggcaggcagtccagcctagcaaatctttggcacttgatgcgcatctttcataacagaactttgatgctgagactcagtgtcttgaaatcagcacaacaaaatggtgcctgaggagcagtgtttactttgatcattcttcaacttctgtgccccagcctttcacagagcacaaattgctttaccagagttacggtgctgaagcccacgactgtttttgtagtctggttgctgtggtgatccttagccttccatgaaactcccatctctagggaaatagaaacctttgcagctgtctcggcctttttggttttgtatctggtggaggtcttcaccgagcttgttcaagcctgagagtgatcggtttgtgtcagagtaaaatacacacatggaaacagggcatccccttcaggatgtgttgtattaaaaaaaaaaacaaaaaaaacaaaaacacagctcccttatccttctctccaatcatgtggggcctttgaagtatctccaagtctggctagagtgaagtgagccttggagatgttgttggtcatgatagtgctgtgagtaagctttgggagcgtgactcaggaagtggggtggccaggtggggaagaaagagagtgggggcaaaggggaaggttaacagggcccgtgtgtgcccagagagaagttggtttaggaggagaatgtgggccgagtccaaggatgccagcagcttgatgtttagaggactatgaggaaacccgttttgacttgaagcctcaatggaggatggtatagacaagagcttccttccataggaaccaagggaatggagaatagcagctgtggttttagtgggtagaagtaataatagctaacacttagagagtgcttaccagatgccagtcactgttctaagtgctttcgacaaatgacagatttaaccctttgacatctgatagaatagatacaattattatccccatgttacaattgatgaaactgatgtgagtagagtcttaacatcctcgaggccctagggtgggtaggtggagagctgagattccaacctaatgcctggctctgagtcactgttcttaaccaccaggtcaaactgcctgtaatttagaaaggaaggcagagtgacccaaaggattgggttacgggagatgtggccaacttagaagaaaatgtagatcttggaagagatgaaattatgctttaaaatgtgtgtgttgattcatgtattagtccattctcacattgccataaagaaatacccgagactgggtaatttataaagaaaagaggtttaattggctcacaattctccaggcagtacaggaaacatagcagcttctggggaggcctcaggaaactttcaatcgtggcagaaggcgaagggaaagcagacacatcttacatggatggagcaggaggaagagagagtgaagggcaaggtgctacacatttttaaacagccagatcttgtgagaactctctcatgagaacagcactagggggatggtgctaaaccattcacgagaaactacccctataatgcagtcacctcccattaggccccacctccaacattggggattacagttcaacatgagatttgggtggggacacagatccaaaacctatcaatttcttcattcagtcattcattcgttaccaaatattaatgtaattcctgtaagtgctagatactggacaaggttctaaggtgataaaaatacaagtcccaccccatgctctgagatagtttatatgtacaaagttaatacaaggcagcagattctggatgctgtaagagatgggtcaacaggacataggtcagtaatatcctctggacacaaagtcttctattttttttttttttttgagatggagtttcgctcttgttgcccaggctggagtgcaatggcatgatctcggctcaactcaacttccgcctcctgggtttaagggattctcctgcctcagcctcctgagtagctggaattacaggcatgcgccaccacacccggctaattttgtatttttaatagagacggggtttctccatgttggccaggctggtcttgaactcccgacctcaggtgatcctcctgccttggcctcccaaagtgctgggattacaggcatgagtcactgcacccggccaacacaaagtcatcttaaagagcatggctttttttttttttttctgtgatccaatgtgaaaatacaaaacagtaattaatgcatttatccctccttccagaaagaattgagaagttactttgctgagtttgtatatagtttccaggagtaaaatagttcctgcctcttactgctatagagcagcttcccattctcctctatgtcccaagactaacacccaagattaaagatgggggtgggtaggtagggggagagacagacagacagacagggagagacattcattctacttccagcactgtcattttctagccatatgactttggcaagaacaccaatttctttacctttaagatgggagtaattagatattacgcagagcacttccttttgatgagagcagcaaatctcaacaggagccatggatctacctattgtctttccttaggagatgatgatgatgatggttattactactgctgccaccatgatttttaacaataatccaagtgcggtgtttttgaatgttcatgtcttagtaattactcctctctggatttctgatttctgctagcaaggtaacactgtactcctaaagaattccttaccagcttcaggttaatatactttctaagattgtactttagcccaggggaatccaaatgccatcctttgctgctgagagcatcttaaatcgctacctgactacaactgcattttgtggggttttgtttgtttgtttttgctattacaaattaactaactttaagatgctgcttaaacagaaatccttattgagatcttacagccataataggttcattgtccaacgtgcgtggcaagtcaatacactgagataccaggttgcagcagagacagaggtttaattgtacagctgctgaactgggggaaaactcaaatccatctcccacaggagtttggggttggagtttttaagggttttgggtgggctgaaatatggagattgttgatgggtcgaagagtgcagggtaaagtcgtgggacagggggatgaagaaactgtgttctcatgctgatttggtggttcctttgtgggagtctttaaactggttggtgtcagctgtcccgttggaattcaggatctgctcatgcaactctcaaacaaaacccttaggattctaacatcagacatcctatctatctataggagcaatggggatgcaaatggtgagaatctagtgctatgtgacttggttacaagaaactaggtcaaagagcagcatgttaatgcttaattatattttctgtccggaattcttgttaacccagtgaggacagcttcaatctctgactgcacgtagcaggtggaatgattactccagtactcagattttgtgggaattgagttcctgctatgcttattttgtaaatcagcttctaatgatcactctagtgattctctttattatgcagtttgatacatcacagtactgatgcacaggccattctaacattctgttgttggtaaagacatatacatgtgagcatactggcttactaaacaggtatgtagcaaagctaatttgaagcccattataaaatgtagaaattaggctaggtactgtgtggctcacacctgtaatcccagcattttgagaggctgaggtgggaggattgcttgagaccaggatttgagatcagcttggacaacatagcaagaccctgtctctacaaaaaaaaaaaaaaaaaaagaaaacaaacttagctggttatggtggtttatgcctgtggccatagctacttgggaggccaagacaggagattacttgaggagttgaaggttacggtgagctctgattgtgcaactgcactccagcctgggcgacagagtgagatcttgtctcaaaaaaaggagaacttgagaggaaatacgtttgtatagcacatagttatatggggctttggttacatattagtgttaaaaacaaaaagtgatctgaatggatgtatttattaaatgtgacagggaatatatatatataaaaagcaaactttccctccattttaatcaatttgcaaatattgagtttcttcagtttgtctaaaattttaatttctaatcattctaacacacttaattgcctacatgcaaacccgtgtaaaattctatgcctctaaaagatagtggaatatttgctcaaaatattttatctttgttatctatccctaaggaagaaaacacgctccaaaggttttttacattttatgtgtttttatttgcgtaactgtttaagataacaaacattttctattttcttttctttgccttttatggttcccatggatggcccaagtgccattctacgctgtcttacacacagagaggatgatgatcagggtggcttgtcctacaaagcctgggagtggccttggcatgctgtccagcataccttccaggaagcatctccgtcatttgtttcagtagctggaatctgcttatcttgactgtgtgttaatgttctgtttactatatacaccccaacccccttgttctggccagaaaaacaggtcaatatgactctgtaattattatcctagtcacatttcattaataacttttgttcgttccttcttttattccttctttcagagaacttgtggactgcctactagatgtcctgccctgtgctaggcctaaggatgcagaaatgagtgtgactcagtttctgcccttgaagaatgacctgaggaatttatactgtgacaggggggacaaacatccaaaccagggcgtccgatcttttggcttccctgggccacattggaagaattgtctcgggccacacataaagtacatgaatgctaatgaaaactcatgaacgaaaaagaaaaaaaaattgcaaaagaaatctcataatgttttgagaaagtttacgaatttgtgttgggcctcattcaaagccatcctgggcagcatgtggccgtgggttggacaagcttgatctaagcagttcattatagtgccaggcagaggcagaggtagaaacaccagtgctgtctgagagagctctggctctgtctgagggagggggaaagattttactggagatggcattgtgagctggacccacaagtccatccggagcactgtggtgcactttaggccagaatcctgcaaggctgcggtgtgttagtgatgtacacagtaccccattcacacaacctatcttaatgccaaagaatgatagaaaagtgcctgtctgtgtcctcagacttgcatcagtagtggcctgctgagggcactagcagcgttcctccacccgaaccacccacacatcagggtctccgctttgcctgcctctcttctccgcagccgggggagctgtggctgctctgggaaggaagggcctgggtctctggaatctccttgcaacggctcccaggacccctttagaaggtcatgacctgtagtttcataaatactcctctgtttatatgagctcttgcccctcaacccccaacccaaatttagttcccagtatttttccagggcatacaaaatatggagcagagcttatttctgcatcccgtttcagactttcattttaggttttttttttttttttttttttgtctcttttgtggttatattagatgattttcagaggctctcagggaatcctgaatcatgtccttgttggggggaagggagattagttttgaaatagactgacagtgcccctctcagcactttaagtggtttcaagacaaaaccattgggaaagagcttgataccatttgaccaaggagaatggttagttgagtgccccaggtcaggatggggaccctgggtgtgtgtgggggggaatgtgtgtgtatgtcaagatttcttgaattcagcaccaactgattaatattcttctagaaattcagagaaatataaaaataaaaaggaaaaattttaaagctccacacccagttctctaaaaatattttgagggaatctttttatgccaattcccaaatggtgaaggacaagcaatggtgaataaaatatcagctgtaggggttccttagatcagaatatactttaaatactgcagcagcaactaagtaaatactgttcccacccctagcagtcagttgcacattttagatccatctggggtcaggtttgagttcctaaaagtcatattgcccaaatgtcagtgaaatttgagttcagtgggaccctagtgtcctgaaataggtttgtgcctttccatttgtgggtgcaaagtgtgggtgctgggagacccagattcaggatgttttcagttactactaacattgttgccaagtgggatgtctccttacccctgaagaggggacagatgatggctatatacagaccagcatgtgattttatgggtcttggttgtaggcacgctgttggagttcttttcttatcttagtgtaaactgattattgaatcatccatttcagagaattatttggtctggttttagataataagagtttccctggtagtgttttggatgacttcattgcttcatgaacagcccacaggggctgttctaagaatcagaaatgttgaaatggacctcactgacacgttagcaaaattggacagctgttagactagcatatcagttgccttgctcactttgctttttcgttcgttttaatgaaccccagaagtagggggtctaactaattcatattctgaaatctctatggtagaaatgccttgcatctatattatgaatcttgggaaattcaaaacaattttcataaggaatctttccataaagcaagtagggtttccccctcttcctgtaattcattttcataaagtaatctacagagtttgagacaatagatagtttttgcttatcaaagataacctttggagaacccagaagccttcactataacaaggtccagaaaagattgtccttgttattttctgctgataatgtgagcaaagacgttcttcccaagtgagagatagggaggtagtgtttccactcagaggctttgtgctccttagagttgtccttgactttgggcaaagttgtgttcagattccccagaaaaacactcagaagatctgctttgaatttctttataaaattgtatgtttgttgcattgcacaggtaactgcagaagacctagtatgaatagatgttgtagaacaggttagaccaattaactcttttccatttaggggaagaatcagcaatgtatgagggatggtgttacataagggatgtggcagatcagatttgcttgcattttctcacaccatcaggaataccgaatatccagcactgtttgaaaccagcatggttagaacaggaactcttggattaggcttcatggaccagtttgtggtcaaagtacgggtttcacgagaaactgcatgtgaaagtttttttagttctgagtcttcatctattaagttcttctgctgaaaggatgacatcttaagaccagcggtgtaatttgtagtttaattagatggatccattttgttaccattgttgctcttagaactttcttactcttttacgatggggttcttaatctgggttaatgggtgcctaacggggagttcatgggccctgcaatgaatgtaattccctgacattgtctgcaaaagtttgtgtgatatggatgttttttgtttggtttggtttggtaaggagagggtgcacacatgcattcagttctcaaatgttccatgactcccaaagatttacaaagaagccagtggtttcgagactggtcattgctgctcctttgagctgcatcccctttggttctaccagccttcacagcttgcatggtcccagtgttcaattccttattacttatcagcccatagacaaagctgttaacctgtatttttatgtgtaaatttgacataggattgatggtcaactctttaaactactgtttggatttccaagctggagatttctggatactctttgtatcatttcttcatgggatatttatttgctgtagtctgcctcagctcggcctttagaccatgagcactggagagtgtaaccacaaaaagcttcaggatattcttatatttgtaactgtagtctaccctgagctataattgatcctaaggaggattttctttttcttttcttttgtctttttttttttcccccaagcctgggagaaattgagcaacttagccaggaattctttgagatattgctgtgtgttctctctacatttctggaagcttttataccatggttcttttgttagctgttttggttgtcctttatcttcccttcagcaagatttactcaagcgggggaagcatagaaaagacaggttgctgagggattaggtgagcaggcacttgcaggactcattgtccctgccaaatgatcttttaaagaaactattgggtatttttctttgaatttcccaattgtagtgtgaattcttctttgccaaatggcttttggggctctgcctggaccctgtgtgccagagtcagagattcatcttggccagacactgccacatattgaagagggagctgtttccaggaaagctcagagagctgtggctcctagaaatcttcccttgattgtatgagccaggcctcagcacttttgaccatctggaaaattttggacctgagcaccaatatctgtctcatagatctttttcttctcatttcatgagcttttataaaaaattcttgttcatttgaaatacatacttactagtattttgtagtatatattttgaccgaaacttctgcatatctatgagctctaagaagaattgtatgcctgaggactgcaaagaaaatcttcagaagaagggttgatgcagcccctgcagatatacattactagtctttgcatcattatggtactcagtaaatagtcttgaataaataaatagagaaaccttttactgatacatgctattagtgaaagagtgttgctttgcagttttcaggtacactggaacaaatgatgatttcatccctccttcattctccatagtgtgtgtgtgtctctttgttcagtacagtttgaatctttgcttctgctatttctatagcatctcttcttctcagtggctatcaatctgtttatttctagatgcggacagcatctccaaagtgtgctgtgaggtagagtctttacaaccaaggagcacattactttgctgtagctgtacttgacatcactgttcatctagtactttgatttagtgctatgcttatgccagatataaaaatgatcctagctgtgtgcagaaatagctcatgacagttggagtattgcttatttttgtatttttttgcaaattagccagctaaattcctttgaacctttttttcccctttaggtaacatataaatatatgaatttgctgtgataagtcaatatttattgtgtgtgtttacttcccggccttttggctaagatcaagtgtattatcgtgtctatgttaagcacagttttttgtttgcttgtttttgaaacagagtctcactctgtagcccaggctggagtgcagtggcacgatctgggctcactgcaacctccacttcctgggttcaagcgattcttgtgtctcagccacctgagtatcaggtgcctgctactatgcccggctaatttatttttgtatttttagtagagacggggtttttccatgttggccaggctggtctcaagctcctggcctacagtccattttggaaattaagacatgcattctcaagctagtgaacaagatgatgcaagttattcatagaatatttttgtggcattgaaaagcagagaattaaaacattattttgacatttgctgagtgcttaccatgtgctaaagcctgggttttgaaagataatgaaagtttactgttttatttatcaatgacctgagagcatactatgataagtgacattggtcataagtggtccctacaaaaaaaggtagaagtatgttgagatcacagtgggctggcagccattgggaaaatgtgaaatagtccagcatttagtgctgtatccctgatggttgtatagacacagatcgtggatctagaccatgtcatcctcatgaggattctagctgagatgtactattattcccagtgcatcattcagtctgtgtctttctagcctaagtccttttttgtcctgtccctcccttattactttatggttatgtttgatgagttcactctgtttaaatatgtgattcttgggtcttgcctccccgctctgtatggaaagccagtatgagacagactgtatgaaagtatctagtcaatatttccttatatatccctttgttctcctatgttcatgttgccctgggctcatgtgtgccaagaggactttgttgagtccatggtttgcagctccattcacaggtgctttttggtgatgttaatgacaacagtgatgacctgcaatagtccttgatctgctgtcaaaattggttacagtttttgtatccatcccatggttttcttccctgttttttttttttttttttttttgacaggggctgtatacaatcactctttattctgtgtgtcctctgtgcttcatttctttggaaaagcccttcaagctaaaagctgagacaatgaaagccctggcagcctcccttggcagccgctttttctcagctttcggcacttttctttggcagaacccatttcactttatagaggttggagcttacctggaggagaagaaagtcatttctctggagatccagagggatgaccccaccccaaggggattttgttttccaagtttcaccttagtcatttgacctaaagcttaaagcaggcctaagggaaggtaacttttgttccacctttgctgacttttagaaagaaaaaatgtgttctgtttatttgttctttggcagggagctaaatcatgctttggttgagattagtgtggttgactaatatgaaatagccattttgtagtaaaaaatggtcaaatattggcaatatcatctggttcaacttaatgtatcttattcatagaatctgagctacattatagcttgtttctgttgatagtgagttgcaaaaaaagtattccagaggctgctctgagtgattttcatggaaagccagggctaagatttctgccctctttctgttgcttcctaggtcacacttcacctgaatcccatctcctcagtccacatccaccacaagtctgttgtgttcctgctcaactccccacaccccctggtgtggcatctgaagacagagagacttgccactggggtctccagactgtttttggtaagtgcttaaacctcccccaaactgatccttagcacaaggacataatggtccttaaactttgccaaacttttcataaaggcttactttcactgaaataatgccagagtccaaagagtgttaaatttggaggatgcacttagtgatatttggatgatgacatagataagcattcacagaaagcagacacacctgcccatcttctgtgggcagaggctggggtctagtgcgcacattagagcaggacctgtcgtcatactctgtgtggcctgagctttggtttcagctctgaaaccccccttgtggcatcaggagccctgtaaatattgtaactggctaccgggtgtgtggtccctgaccacaaaatgaatatgcacggacccatactatttgtatataacacaggcctaattcctgatatgaggatctgtttgttgagaaagtgacacagtgagctccaaaatgaagtcatttgtattttattaaaaaaacaagctggaactcagctcttgtcgaaagatccaaatattacctactatttgtaaatcatgtccctttgagtttgccagaacattcaagtgtgctagttgtggagaaatcgatgggttgtttggatggaatttttttggtgtgatatcatgtctgatgatgagcagcactgcaacttggtagttgtaactcacattgtctattacgagagctgcaggctaatgtcctaactgcggtgcctgaggccttaaacctctcttgcccacaagcatccaaaacaagtggagtccccagttaatagttttcctcttgcctcatgaataaactttgcccagttaatgtctctcaatccagatctgtagtttctttcccctgtgtttgaagagtacttctaaaaactcaaaggttcttgttgaataatgtaagaatccatagtcaatacaattattataataagtacataaatgaataaaagggagaaaaggaaaagctcatctttatagtaaaatgccaactagaaaatctagaaggagcaaaggagttagaaaatgatcattttgcaaccatcataataaaagttgaccaggcaagaattatcaacagatgctaaatctagcagagatggagggagttcaggaagtagtatatttagatattcttaaaatatctttcatacaaattacttattaattacacataaaaaatagtgactatataccttggggatatcccatgataccttaaccaggtgattaaaattcatatcagcaatgtggggcagatggacgctgtgtgcctataaatgagagagaacacagcatcacttttgtggtatttttgccagaaatgcatataacctgaatctaatcatgaagaaacgctgacaaaaccaaattgaacgacattctataagataactggcctataatcttcaaaagtatcagtcatgaaagacagagaaaggctggggagccattccagattagaggagacaaaaagacaagacacatgtgatcctgagctggatcctgttgggtagggagtggggcagctgctataaaagacattagggggacagtggattgtattttatataaataaattataattgagcctatagattaaaatattatatcaatgttatattccttgaatttgataattatgttgtttttatgtaagagaatatccttaggaaacatacttaatactctttaagattaagggctaaaaggtcagatcattcaggaaaaaaacatgttgtatagagaagaataaagcaaatgtggcaaggttttaaaaactgatgaatctagttaaaagggtatagtagagtcctttgtactagcaactttgctgtaaatttaaattaatttcaaaagaaaacatttaaactcaaaaggtacatttacaaggtgggcattacaataactttattgtagccttttctgggaattgcaactcttattctatattaaaaaggccaaaaatcaaaaatcagtaattatttagttgttattactagcacatttatttagcacttaggatatttcaggtcactaaatgctctaatactttaattctcacgatagccttctacagtaccatagtgtagatcctttcttatagatgaagaactaagatttagagaagttaagtagtgggccaaatcacatggctagttacttgcagagttggtactcaaacctagatgggacccattctacaagctgttatgctaaactgtctgccttcgtactcataatcactgtcagtctcctctaattaaagttacttgtgatagtaatactaatggctctgatcataaagtcatatgcacatttagccctcatactgtagagctatactgtccaatactataggaaatagctgtgcgtggctacttaaattacagttcttcagtcctgcttagccacatttcaggtgcttagtagctatgtgaggctagtggctaccacagtgggcaggttatggaggcattatgagcaaaggcagtgcatgtcctggtttagatccaagcagtgaccttgggcaaattaatttctctaagccggatttttctcaggccctgcatcatagggctgttatcttgagtaagtgagatcacatataaaatgtttatagacatcacctgctgttgctgctcttatttatttctagtcacagtaaagagcatgtgggacgggtgttgaatttgcatctgtatttatgaaatatctagtttggctggccccagatcaaaaggggttctgtttctctgggctataggtccagatgaaagtgtgggctacgtatgtcatagttgtacttatcgctgcctggattctttcttcagtctgccagttcatgggttttgacggaaagtgtcttactcttagttattaatttgctttaattttgcttaaaatctgtaaaaactgcttcttggtcatcagtttagacactaacaatgaaagaaggtggccgctttagtaaacaattgaacgtcagccccatttggatcaatcccatgtaaggagattgcagatcaagtaatgagcctaaaattaccaacacgtgggaggcagcatcaggagaagtcaaggatttaaattccaggacacctgaactctgctttgttgtccagcaggcttcctttagggaaaacggtttttttcccgtctgcacatttcttcttggcctggaagagacgatggaacatctgttgttcattcacgttctcacatcagcagacaacgagtgatgcaagtccttgcacaagctgggccactctccttgggcaggcttttcccttcctctctgtggcctgaaatgaattttagtttctcctcatctccttgatagcctttgccacagagggtctggtgatcaatagaaatccagtagtgtgttctctttatccatttgtatagttaagagttaaagtttggggataagataactaaattattttatataaagtgttcatcaaacacttcagagggcccacgggatctctggaaattcaggcttcaccgttttcatcactgtcttctccgaggttacccagggagcctaaaggagctgtggaaagcgaatgggtctcttgactctcagtccacgatgcatgtatccttgcctgtttcctgatatgctgctggatggtttgcatttctgtctcagagctgtctactgtgtacgtagagttacagaacttttaactgtttttttttaaatagggcaatgagaaaagttcaagtaatagcatctactcatttatcagggtgacctttttatttaaatggacatgtctgtgttgttatgactgcccaaattaaaaaaggaaaactttcataattagttaggagggccttatgttacccaggacatcgcagccacccttgagggtgactgaaaacatactttaatactagtaataaaggcatctgtctttttctgtcaaatcatttcagtccttctcaccccctcacagcacaggcaagaagggaacgtgtcaggcagggagaaagtgggatttggttttctctgcaggtgcagctcctttatctggttattctggttacctaggaaatatgagtgggatgaagagtgatgctttcaggctgagtttcaagtagtgaatctttgagtgtgagtcacacacacacgtgatgaagttgtaataatcttatagttttccttttgcagggtgtatgggtggcccagagaacaatcagaaataaaaatcatcttaccctctcagtgtgccatgttgaaactgcaaataatctcttagaaggatcacataagcctgtttttatttatgcattcatttctacactgaaaaaaaaagtaagataacttaactgggtgatgatgcctgaaccttcaacctgaatttgctaaaatgagagccacagtatgaagttgtctttaaggacatactacaatttaaatacacggtttctagagaaaagacacaaatggccaaaaaacacatgaaaagatgctcaatatcatgagtcattagggacatgctaatgaaaaccacagtgagatgccacttcacactaggatggctttaataaaaaaggcgataacaagggttgtgaaagctgtagggaaattggaacacgcatacattgctggtgggaatgtaaaatggttctgtggaaaactgagcaaaacacatgtccccaagaacttgtccacaaatgtccaaagcatcattattcacagtaaccaaaaagtggaaacaacccaaatgtctaccaacagatgagtggatgaaaacagtgctatatccatataatggaatattagccataaaaaggattgaagttctgatacataccacaacatagatgggtcttgaaaacattatactaagtgaaagaagccagatgctaattgtcacaagttgtatgattccaatttatataaaatgtccagaatgggcaaatctatagaaacagaaagtagattagtaattgccaggggctgatgggaggggaaaatggggaatgactactaatgatacgagatttcttttgggaggtgacaaaaatgttctataattacatagtggtgaatataccacaccttgtgaatacacacagaaacactgaattgtacagtttaaaaggctgaatattatggtatgtggactgtatttcataaaactagtaaaaacttgctgcagcacttttttttttttttttttttttttttttgaggacagagtctcactcccttactcaggctggagtgcagtggtgcaaacatgcctcactgtagcctcaaccttctgggctcaagcgatcctcctgcctcagcctcccgagtagctgggactacaggtgcatgccaacatgaccagctgattttttttggtattttttgtagagatagggttttgccatattgtccaggctaatctcaaactcctggtctcaagtgatgcacccactttggcctcccaaagtgctgggtttataggcgcgagccacagtgctgggcagggactaggtttttaaatgtatctttttactttattccatgtacctgatttttttttctttttttctttttttttttgagagagggtctggctctgtagcccaagctagagttcagtggcatgatctcggctcactgtaacctctgctgcctgggctcaaaccatcctctcacctcagcctcccgagtagctgggattacaggcatgtacccccacacccagctaatttttgacttttttttttgtaaagatggggtttcactttgttgcccaggctggtcttaaactcttgggctgaagccgtccacctgccttggcctcccaaagtactgggattacaggtgtgagccactatgcccggcctctaattttttttttttaatcttgctttatttgtattccaaacttgagcattctctcctgcaaggtctgtagacttggagccctaggacaagcagacgttttcaagatgagaccctagtgcctggcttttaataacctaaaatacctagtccagaggccttggccagcttacttatgtcaggcttagtcactttgcatgctcataaggaaaaaagggtatctaagattagaagtttcaagaaataagcagcttcttccaacctcattcactctcgatattactgtgctgtgatctatttttttctagccatttatcattaaaatcagagagcaaatgtatgtgaatgtgtgtatgtttgagtgggggatggggcatagaaggggattttggtctttgaggtacaattgctggagctggcatataaaaatagaggatgcccaattaaagttgaatttcagataaataacaaatcattttgttagtgtgcccatgtagtatatgggacataacatatactgaaaaagtattcattgtttacctgaaattcaactttaactgggtgtcctgtactttattgggcagctctactcggaggtaattcaggtttttgtttccagttaacaccctggcctgggtgttaggaggcctgagtactagtcttggctctgccactaactagttatatacatcatcgggaaaaaaaatcacttaactactcagacctcgtttcctcatttctaaaatgaggggatcgtactagctcatctctaaagttcctcccagcttttaaactctgtgattctttgatagtacgactgctagatgttatatcccaatttaatttggaacagaaactggcaaattgagcattgcctcttcagcaaatccaagtaaatatcaaggcagggcagttgcaataaatgacagaaactaaactctatgctattagctttggattaaaaacaaatcaaaacttaatcctaatgaaaaatgtaaattaataaatttaaaaccagttttgtattttcaagaagcggggagggatgggtgaagaagctggagctgccaacatctagtttattccttttacttaaactagaggcattaaaaaaaaaaaggtccaaatattttgggcctctgccaccaaaccacaggcagttctctggtctgcactggagtttggatgactgacaagactcagtgaaaaacaagtgctatttgttttcctgtgcctagtatttaactggaaatcagaaggctaaatttccaatcagttgctaaatagccccagatgtgtgctcagtgcagcactaggaagggacacgcacagcccataccaccgtgcatgtccagctgttaccttttcatgaagccaagtgatgtgtaactgagggttgtagtgtctgtccaaaaacgccctaagaataactcagacattcaagtttgcttgtggagaagggaactttttttaaaaaaaattctgtattctattgtgttacatttaaaaatctggaaataatttttttctttgctaatttccttctttcccttctttggcagttcccccacccccatgtttagaaaaaaacacagaattagcataccgggtatgatggtttatgtatgtgcttgttcattcatccaacacacagtttttagtgcctgactgtgaactgtgctagctgtggaggatctagggaaaactggggtgaattgcctgtcgtcagggagcttcccattgtgtgggagagctgattgaaaaattgggaattgcagtttagtgtgctaagtactattacgctaaataatagtgaaaattggagaagatgagaatagtagaaattggagaaaatgagaattctcttcttccaaatgcaatcaaggcagcttcctgcatgaggttggctctggagaacagcatgtggcaaatgggtcaaggttgcagacacaaacacagctcttggctcggccagaagcattacccctgtattccagggacccggatataccagtttgtgttttgcagtgaggtctttccccagataaattctctcttgaagggagattaaataactaaatgtttcaagattgctggtggttcttcttctttttttaaatgtctcttgtggaatgactcattgtgtcctgtgggatattccaagtggttgtgtaccatgcatttttattccggagtctgctcatctgttggttttgtggcttgtccttaagggccttaattatatgggtcttgatcctctcatgaactagggtcagtcaactaccctagttcaaacaagtcattcctgtttcctaggaataggagtttttggccctattgtggccattgagctcttcctaaatgtcactatggcaattagaacattggaaagagcccagtttcaactggtaaacctggtccagaaggggtttttgaaagactccctgggatttattctaacttgctaggttaaggctggtgaatgttgtgagtgagtgaatggcccgtggcccctgggagatttgcctgggtgtatttttcctgaggaagacctactgtccaggagggttcacgcaagtgtagacttttcctggctctggctggacttgcgtcatgtctgtgtgcaggcatgggttgcagccctgtgaaggctttgctttcattcaacaaattgaggtcaaataaactcactttcactgaggaggcaaggttggtgtttcttcgtgtggagtcccataacgtcttttaaggctttattgtctaaggctaatctggtaatcagatgcatctgcccttcccaagtgttgggcaattgtatcaaatgtcacatctctggtgccctttgttgacgtggtggccagcctccagagagctgttcggtagaaaaagtgactgttttgttaaggaaggttgcagaatattttatttccatgtaataggaggggaaagaaaccccaactgtctaccaggagactctgggaggctgacttgaaggctgtggctgtgccttgttccgctcataaattatagacagtgatgcctttggtaagggttctccacaggtgacctacactctccatctcagaaagcaactccaggatggtccaactccttcctggacacaggttgttgggtttatttgaggcaaattggttcttgcacctcgagtccacattatctaactctagcttggaagctacttctgatttcgcaggggaggaaggagtccctttagccttctaatttctgtgtctaggatagaatttgcttttctcaagatctgcttttgccttttgttcctaacactgtatccttagatgacccagggtctttgttgcaactgtgggtccttaatgccactgtgctagggagtcaccattggtttgcctctgccttgtcccactgaggtggtgaatgacacagtgtatacctggaagtcagggggtcttccgtctgccacctctagcaaaagtctcacagtccatttgatctctggcctttccatctttatcacagagagcctgttcttgagattctattggttctgggtgatacagatggcagagtgatgttcagagctgctgtttggagccaagcctgccccaatccattaaaacagggtttttatatccttttcttgcagtttgtataagaaggctatggtcctgccatagtgaggaatgactcgtggcctgtcaacctcagcatctgtcagacaaatctcatggcccaatgtgaggatacatacacacatatgtgtatgtttaacaagcacttctagtgtgtgccgtgtgtgaggtactcttctgagtacttacatgtatgagcttagtcttcataataagcctgtgaagtaggtgcttttgttgtctttgttttaagatgaggaaactgagacaaagaggttaacatgtacctggtcccatagctagtaaacgggggctctaacccagggacagtgcttagtaagtactcagtaaatgttagcaataataataataataataataataataatactttccagaatggtaaatggggacctcattgggaacagtcacactgctgactcgagggcatgactatgattttatctctaactctggcctccagtctggagccactcatgactgttccaagaacagggcttcagaattgaacctatagagccaaatcagggcatcgcatcaggtgagcaaacttcttgtttcagcaaagtgttttatgcatgacttatttcagtactgggatctagatcatatcagtatttcacttgaataaagattttaaaactgtttcttgacccctttcccaagagctttccctctggggtcccagttggagcgtttctggatcagctccaccaggatgccctaatatctacatctatcctgaaccctgtggggaccgtttgttaattgatgctaaatatgtgcagttcaaccttctttgctttgacctaggagaccaccttgatcatcttcagagacttcaatgtagactgcaaaatgggtgtggcctgcttaagagggctctgcctttgcttcagagctaattttaggaagctcaaggaggctccaaccacagttatttcgggctagaggcctcacctccattcttgccctccaaggaaataccctttagaactttttttcccaaactgttgttaggtctgtggttcctgggccagaatatgcagctctgtttctcctagggcttgcaccagccattcccaggagctatcagtcagcatttatctagagaaacagaaccagtcggggatatatatatgaagagatttattacaaagaattggcttatgccattgtggggacaggcagggcaatcaaagtccgcagggaggccttcaggaagggcagctcaggcatgagcggaagccgctgtccacaggtggaattttttcttcctcagggaagccttgggtgtgctcttaatggctttcaatggattgaatcaggcccacccagattatctgatacaatctcccttccttagtgccacctgattatggagtttaattgcgtctacaaaatacctcacagtaacgtgtagatgagtgtttgattgcatagctggggaagatggcctagatacgttgacatataaaactgaccatcacagaaatttttaagatccttgagcaatttgttgttgtttactctaacttgacttctagccaagtaattatttcgttgctttaactgtttcatttctatttctgtctgtcccttccattccgttcctctccactctgaccagcacagctcctgagattgctggggaagaggggacagagagggaaataacccaccaggagaatctctgcaagcagcagtgaagggtgggagccccctgctttgcctcactgcttttccttttcactctcctctaagcctggagaatgttcctctgtatttgcctacccagacttggtagaaagcttgccctaagacacccaggtctttgctgacctgtgagccagtcagttccctcaccaacgggagatgacctttccaggcagagtgtccaccttcccacagtggaaagagcatcatttttggagtccagcagacagtttgaatctgcactcatttcttgctaaaggtgtgtaatctggcactttatctaattgctcagagccccagttgtttccactatcagatatgaggattcagaatccatgtgacatgcacttaggaagtgtgcagcctgagcttttgtgattaatatcatatttcctagtgttttattaacatgaggctgagggatgtgcgtgtctaccctacactactgatttctgagcctggtagctgactcttccacagcgatggaatagaaagagctctagagtgagaaaccaggtctttggttctattgtcaaccctgttgtctgccagctgtgtgccttgggtagatcctttagcttctgtcagcttcaatttccttctctgtaaaatggagttgagattatcagccttgatgaaaaaaaaaactctataaagagaattctaggaacatgtttggagccaggcatttgtaaaaatcagtttttgctcttgaacttgacttggctgattggatgtaacttagaagaaaaaaaaagagagtcttccctcctgtggggttctccaggagcacatttggaggacaaaattagataaaggaatatggcaagtaatagtaatgataccaacattttattttttttcgtgaaaaacatcatttagattgaaatgcactttgaatttgggggtaagctcttccatcaggctaacattggcagatgaggaagggtaaagttaggagtctgaagaattttttgtaaagctggacaggattcctgtgtggcctgggactctactttggaaaactatattagaaagcagcttgtgcttcatcagtttggtaacttgtggggacttagtttgttttttagatggaaagacatcttttgcttctctttgtgtatatacacactcacatgtactgttgttctgataacgtttccatgggagatgagagtattgcttttgtactggctcatgttcaagtttgtgcatgtttgtgtttggagggcagcatctcagagctttcctcttggacgtgtgtaaacatgcagggtgttaagaacatggggcggtttcagtcatttaggttttttttatatttcagcaaaaattaagaacaggatgatcatcatgaatgttttgagaaaaagtaatagtcaaatatgttttaagtcattttattggaagaaagtaatctggtttggggtactaaataaaatcacccaagaatttttaaatggctgcatggatttgtgtttcatgaatgcatgattggcagataccatcatcacatggctcatgaatatgtagctttgcaaattatgaacctaggttcacaggcatggaagttattatttctttgaaatgaagcttttttaaaaggcattgagtcatgatatatgttaatagaaaacatgtttcggattgcatttcacatcacatggcttcagaggaaataggcaagtggggtcctcccaggaattgggtagggagaacgtgtgattttcctcttttaaaatgcagggttcagtcttcatttggaaggtaaatatttcagtgctgttccagtatgtttgtttttgctggactttgtgtgtccaaaatacataaaagcataatctttgtaatgcctttctgtgtgggggctgtgatgagttctagggccaatctgtagatcccacttaaacctcaactgagattcttgaggaatacctattctcctttaccgtgtgtcttttccccctggaactgagccagcaagttcttggcatggcaggtgtttctgaaatatcagtgtgtttttctttgctttctttgttttccttgttttgctctttctattttcctaagcaggcaactccaaaaagagatttgtttgtgcaggagtcaggaaaagggaagaggaatactgaaagctgggagtagggcaggacagaagagggggaggagtctattttcattgtgtaagtgttgaacttccaccaatgccaaagtcacggacatgtgtgcagttggatgtgcgagttagagcagccccaagggcctgtaacctgaatagcaggcactcacccagctgataactcaagttccaaatggaccacagctgagttgtaggggatgtgtgtgtgtgtgtgtacgcgtgcgtttgagattcctggaacagatttcctctgagatctcaacaggctttttcattatcattggggagctatggtttctcttatttcacaaggcccatttcttccttttgagatgtgcaaggagatgactccatccatgacttggctttacactctccctcttggctttttatcatcagtgcagaggagagattcttgctcgttcttcaaacaatctcattcgagctttataaagattattggagtttaaataatattcatatctatggcctagaacaatgttcctcaagtatgcgtcagaatcatgagtggtagagggaggattataatgtagtttcctacatttctacctcccaccaccctggagtctgcattttaacgtacttctgtctgaggatcagactttgggaagcgttgggcttgagatgttttcttgacattgatttatgttgagaccagaccaagaagcagatggatggacatgatcagttcataaacatgttcctttcttagggtcaaattggaggaggctctagagaagcactgtccaatagaaatataatgccaacaatatatgtaattttaagtcttctattggtgcatttaaaaagtaaaagaaggctgagtggctgggcatggctcctcgtgcctgtaatcccagcactttgggaggccggggtgggcagatcacctgaggtcaggagttcgagaccagcctgcccaacatggtgaaaccccatatctactaaaaatacaaaaaattaaccgggcatggtggcaggtgcctgtaatcccagctactcgggaggctgaggcaggagaatcgcttgaacctgggaggcagagactgcagtgagctgagatcgtgccactacactccagcctgggtgatgagcgaaactccgtctcaaaaaaaaaaaaaaaaagtaagtaaaattaatattaatgacactttgtttaacccagtagatccaaaataatatcacttaaacttgtaatcagtcaataaaaattaatgagatagggatttttcttgtgctaagtggtatgcattttacatttatataacacaggtcaatttaaccagcaacatttcaggttcaggtacttgatggtgccatgtggccagtggacactacattggataacagctgtagagcaatgatgccttcgctaaccccctggcagacacgtggttgctcatggcatttgttcccatttctccactgctcctgaatatgacctcagaatccttctcagcacagaaccttaggcaggcactgccagttaattggacatcaagatttgttttatttatcaaacaaatacttaacaagtatcttttttgtacccaacacttggggtatacccatggacaatgcacactaagatcccagcctctgaaggaaccttctagtggaaggagttgggcaataagcatattatatggcattttagaaggtgacaagtactgtagaaataaaatgtaaagtgagtttgggaaaatcagaattcctagagtggggctgggtggtggggttgtaaatttaaatgggcccattgagaaggtaacatttgaatagacttgaaggaggttgaggtgaaacttaagatgagacttaatatccacttttgatctagggtggcctgaagtttcctcaagacttcatctgggagcattctttttggggtaggggtcaaggaggcaggaggatggggatgtgtggcactatccacagcaagttcctctcctcaccactgaagactaaaccaacgttggggaggcccagagagaggctacaatgcaacctgccaggtggtgagtcagctgatgtgctaagtgctaaagcaaagaacctcagtgccaggaaaatggtgtctgtgctcattagctgggacttgtacacttcactcaggcttgggagatcaaccttgaggcttccgtggatccgctgaggactttaagagttaaagcttaaagacaggtgtggaaacaaagggctggttgcctctttggcttttttcatgtagttttggatgaggttgttgaacctgatccagaaaaaataataaacttggctgtggttgcctagccgtaagttcttataataaaactcccagcaattggcagatagagtaatgttctgctctttaaaaaagtctggtagcataacctgaatttcaaatacaaatgttgtgcatggttcaagtagggaggagcattcaggagagtccagggtgcacctcagcatcccaggatttgtttgactgtaaagtgcttcatggttccccttcaacaaacgtttactaggaattgggacccttggagcccagtgctctgttcattcccacaggaagacatttgtcatgtcagggaatgttagaggattgggttttaattagcaagcaggaggaaagttcattgggttgtggggaagacatggaattactaaatatgctttaataattggtttttaggtggagttattaggtgaaaaatcaaatcattagctttaaagcttggccaaaagctcatttcctgggcagtaagggaagcaatgagtttgggtaatgggaatgaatcaattatggtgtatcttttcctgtaggtaacaacattgagctttcattcaacaagcaattattgggtccttgcttcatgcccagcactatgccaggcccaagggattcagaatgaacaaggttttttcttggccctcgaggtgttgctctttgtcaaatgagggtggcaggtatgctgataaatagttgcagtccatgtgagagagggatggactaaaggtctgtacagtcacttgtgtgcagctcattgtgaggagagtagggagcctgggaggcttcacagagcaggtgatactcctgggaggacacagaacggtttgccatgggagcaaggtaggatagacgggttcaggcagggtgcagggtgtaaaaagacccaggagtgtgtggcagcatgatgtgttctacaactgtgagtagttcttgggtatgtgggagggtggcatgagatgagggcgggcagaggcacttcagtcatgcgccatgttaagatgcttaggtgccattccgctttatcatgtgtttactttttagaaggattacccaggtgacagtgtggaggaggggtagaaggaacaggaatagcggctgggagggtagaaagttactgcaacagtttggttgagattataaggacccaaaatgggacagtgttgtggcaagcctccagggataaggtggaagatggggcatggaataaatagtctcctcctctggcacacagctcctccaaccctcatcatctctgaagtgttaagtacctttttgtatgctggtgagatgactggtggctggggctcctggatagcctctggatgggggctggttgccaagggaaccaaccatgtgattagaggttagaactttcagcccacccctctgaaggaggggagaagggctggagattgacttaatcatacatgaccaatggttttatcagtcatgcctgtggaatgaaggctccctagaaatccctgatctgtggggtagggtttggagagctgctggttggtgagcatgtggaggtgccggggcgtgggggagtggcgctctccgagagggcacagaagctcctcaccccttccccgtaccttgccctgtgcatctcttccatctggctgctgttcttgagttgtatcctttatcataaatgaataaacttaaaagtatttccttgagttctgtgagccattctagaaaataattgaacctcagggtcatgggaacctatgatttatagccccactatcagaagcatctgaagaggggcagtcttgtgggactgagcccttaatctgtgcggtctgacctatctccaggtagatggtatcagaattacatcgaaatacacagcatcaattggtgttctgagttggagaattagttggtgtgggaaaaacacccagacatgcgatgtcagaagtaaactattgagagtggtgtgagcatagagaaaaataggttgtttttctcctatacactcttgcagttatcttccttgcagtgatgattgcaaccctttctcatattagacaaaattattttccctacatttcttatgtgttttgctattctctttatatcctatgttcttctacaagccagactctgataagggtgctatgccatgaaaattaatgcagtgtctggagcatggactggtagactagaggaatgacctggaaatatcttgtcttcatttcagcaaatgatatgatttgggtctatgtccctgcccaaatctcatgttaaatagtaatcctgtgaccgggcacagtggctcaggcctataatcccagcactttggaaggctgaggcaggtggatcacctgaggtcaggagttcaagaccagcctggacaacctggtgaaaccctgtctctactaaaaatacaaaaattagccgggcctgatggtggacgcctgtaatcccagctacttgggaggctgaggcaggagaatcaattgaacccgtgaggtggaggttgcaatgagccaagatcatgccattgcactccagcctgggcgacagagcgagactccatctaaaaaaaaaaaaaaattgtaatcccagctgggtgtggtggcttacacctgtaatcccagcactttgggaggccgaggtgggtggatcacctgaggtcaggagtttgagaccagccttgccaacatggtgaaacccgtctttactaataatacaaaaattagccggatgtggtggcacacgcctgtaatcccagctactcgggaggctaaggcagaataatctcttgaacctgggaggtggaggttgcagtgagccgagatcgcaccattgcacttcagcctgggtgacaagagcaagactccatctcaaaaaataataaataaaataaaataaattgtaatccccagtgttggaagtggggcctggtagtaggaggtgattagatcatggggatgggaagatttcctcttttgtgctgttctcgtcatagtgagtgatttaccacgagatctggttatttaaaagtatgtagcacctacccactccctctcttcctcctgctcctgccatataagtcacgcctgcttcctcttcaccttccaccatgattgtaagtttcctgaggcctcccagccatgcttcctgtacagcctgtggaaccatgagccaattaaacctcttttctttgtaaattacccagtcccaggtatttttttatagcagtgtgagaatggactaatgcagcagggttcttggtgggttgtagcatgatgcccttacaaagatgaggaaggttctgtgaggtcccttggtagttggctgaacaacctggaaccccagcaaggactgctaatgtgctcaggttagtgtgggagtgtacgtatgagtcacagacttcagccttgtcttggtcaacctctcagggatttagatgaaagtgcagaaggtgtgctataaaatttaattatttatagctaataaaataaggatttttacatggtctcttcagacttgaaatatgggtctgaagaataactataagactttgcatttattttgggagaattatgggtataaggataggatagaaaagcctcgaactggtgaaaagaccttggggggttaggtaccatcatctctaccatccttcctggtgtgagtgaccactgtttctcacctgaattattccggaagtctactaatgatctcctgctttttgtctccccttagactcaacatagcagccagagccatcctgcgaaaacatttggtagatgtttcaatagtccttacaacggtctacaaggtcctgttgggcctactggtctcctctgggacctgtgtcctaccaaccttgcctcagccctgtgtcctaccaacctcctctcagccctgtgtccagccacactgacctccttggtcttccttcaccatgtcagaccttacacttgctgcgtctcaactgtgaatgctccttgccctgatgtttgtgtggtttgttctttcgtctcctttaggtctttaacttctcagtgaccttattgtgctcctctggctgtcttattagactttaatctccataagggcagggaattttttctgtcatattctccactgtgtctctccactgtgtctccagcatggagaacaatggagtaggcaggcactccataaatctttgttggctctatgtttaaagcatagattagtttattaggctgttcttgcattgctaaaaagaaatacttgagactgggcaatttataagaaaagaggtttaattggctcatggttctgcaagctgtacaggaagcatagcaccaacatctgcctctggggagacctcaggatgcttttacttatggaggaagatgaagcaggtgcaggcacttacacatggcaaaagcaggagcaagagagagaacgtgtgtcgggggaggtgccacacacttttaaatgagcagatctcacgtgaactcaagacgagagttcacttattaccaaggggatggcctaagccattcatggggggatctgcccccatgatccaaacacctcccaccaggccccatgtgaaacgttgggggttaccattcaacatgagatttaggtggggacaaatatgcaaactatatcaattagtaaatatgagatcatagcagggttcagctgatgccaaagctaatgtggatgcttcatgcagtgttcacatatatggagaaagagatttattataggaattgtctcatgcaattatagaggctaagaagtccaaaatctgcagagccagtgccccagttccagttcgaaggcctgtaggctgctgtagcaccgggaagagctgatgttccagtttgaaagccatcaggtagaattcttacttgtgagagagtcagctttttgttctattcaggccttcaactgattggatgaacccatacatgtcagggagagaaatctgccctactcaatgtactaacatttaaatctcatccaaatgcatcctcaccaaaatacccagaataatgtttggccaaatatctgggcacctgtggcccagtcaagttgacacataaaatgaaccatcacagtatgcttctcagaccatacctggagaccttgaatcttgtcccgacaccgtctttcagagactatcctgttgacgctctgacaaccagggtatctggggcagaactgaagaagctaggggtgttgccctgaaaaagcaaacatgtgattgaggtcagatgacacctttaaacacctgaagtcttgtctcatggaagaaagacgaaggaattctttgttctagtaggcatggctcagactagtgtataaaaaatgaatctaacagaacagaaatctgctgtcttgggagctagtgaggtcttctttctggaagggtgcaagcagaggccagctgtgaccaggagtcagaagtcttaagttctggtctgggcctggtgcatgactctctggccttgggtaggccattagactctctgaggtttccgcttttctgctgtagaggtcaccgtagcctgcctcacagttccgcaaatcagatggaaataacatctgaacaataccttctaaaacaacaccttctaaaactcagctgtagccttgtcagggtcaggagagctggcagtcaggaggggagtgctagctcactccttgctgaagctgaaaatttccactgacctgcagtcagggacacctcactgcagctttgctttcttcttattggaatgtgcctgaggagtggcagttaactccagttccaaattcctcagccctgagtgtatgaagcttattgctgctggcccgtgaggacaacaatgcctggagggagcagagggagttgttcctcctccacgaatcagccccatcaccagcttcatcacggcatcgctctttaattacttcaggacacaattcggagttgccgttgatatcttctgtatttgtgctgtttgctttcttgcctctggaatgcaccagtgtgacatcccgctttccgctctgaaaaacgtactctgtgtataatgtatatagggttgctgtagtttatggccacaacatgaatgagaaacaagaagcagaacatccagggtttctcgtctaaacattcagaactgtgctggcagtgggacaaaggcctctggactgttgtgggttttggtgacagccttgataaaaatgcctttttagtacaagtgaaaggaagattttactacagtgcaaaagtcaaaaaattagataaacattgttggaagttcagtgttgatgagtagctaagcctcagagaagttacacttaggtgggcatggttattttttggcaggaaaatgacctaggatttttttcttattcaggcgacgtcaaaacaaggttagagctacatgttcccctctggttttgtttataactggcatcaggacattcagaaatgatcgtgactacacttgacagcactgatacgtagtaagtgtgcagtcagtggtagctgttgtgagtagctttggtttacaccgagtttattagtgattaattcagggcttccacagagccctgtgtagttctacacagctaccactgactgcacacttactacgtatcagtgctgtcaagtgtagtcacgatcatttctgaatgtcctgatgccagttataaacaaaaccagagtggaacatgtagctctgtaccatctgtgtggcccgggcatcaggatatctagaaacttttcaggtgattctagttttcagcttgcaacattagtaggtcatggaatcaattaattgaagtacttttttttgccagcgtttttagaagatacgtttatataattgtatagaaaatattaatgcctagcacagtagctgggaaaatataattttgtgtgtgttaaaaatgctgctgtgatagaaccactaataaaatccctgccctcgacttgcttcttagtcttacttcagaaactgcatgcttttcgttatgaataaatggttcatgtgaaatttaatacaagacatttatagttctatgacctgagaatttgtgagccttcttgcccacattttgaggtttcactctgacattgaaaaaatcagttattttataaatgctagccaacaaaaatggcatacatattttcaccagcaactaaatttgattatagcacagcaacaagatgatgattttcctcctttggatgtgttaattacacatataccatgatatgctaggtcagcagtggtctaaatacattcagcaagaatgaggtacttgcatacgtcatcctgaaagttttattagatcagtttaacagcctcttgacttcattatctatgggaatttgggggtcttacacaataaactgttacaaacattcatctcactcttatgaaatagagcaatgtgatagaaaggctggcaacctttggccatttttatctcagtgctgaggtgaacataaaccaagaggactctcgctgtttccctattgtgatgactctgttggcagatgctgcaactgtggaagacctgaaagtcgtgatcagttgctagcaggactttgggatcacttgtcttgatcctgaagctttttataagcccacgagaacattcatcaaggcttcccacttgacttgaaatacattcattgtaagattggtcttcgatttagatttcttggaaatagcagtgataattcttacgattactcaatgtgcaatgcagtccgtcctcacaaggttctttcagagttcagagggacatcctgcattggtagttttgcctttgtctgggaggactaggcttgggattattccttgaatccgctgcttaaaaacgctgatctgcttgtataacaaagggaagaggttcgatttacaagcacttcgatttgagaagtactttctctaattatgattcagctccggtgactgcaccatgttaaatacgcaattctctttcctctaggtgtctgagggttctgtggtccagttttcatcagcaaacttctccttgacagcagaaacagaagaaaggaacttcccccatggaaatgaacatctgttaaattgggcccgaaaagagtatggagcagttacttcattcaccgaactcaagatagcaagaaacatttatattaaagtgggggaaggtaaattttatgtggcttcagttaatgactgatttatgacaggcaattgttttcttttctgaaaccaggtggttagggcaaggaatcacagaattacagaatgttggacctggaagggacctgaggggtcatttggccccaggcctctccaccgccccccatattccctcccttcttttttcctcctggggaagcaggcctggttatggccaagtgaaacacagggaggagcagggggagagaggagaaggttgttgtgtgggatttagaagacacccatgcacagaagtcaaaaaaagtaagtggaggtgagaagctgagggtgtgggaaggaggtgatgactgatggagtggaagagctggcagaatgaatgggtcagcaggtggcttcctcttacctgtgttctgcaaacgtttgaagcctgtgtcagtttgtggtgctgagacataggttacattttggacaatagcaaaggaaaagtatttaaatatatttttagtacaaatgactattacaaggacaaattattggagaaaagaagtgtagggtcttgataagagattgcctatttaaatttccttgcattgcaaagggatagaaatatccagaaacccagttttgaaagccttttttaaaacaaaaacaaaaacaaaaaaccttctctttctttctcattctttcattctttcattcttttcctccctccctccctccctccctctctccctcccttccttccttcaacagggtcttgctctgttgcccaggctggagtgcagtggtgcgatcagtgctcactgcagcctcaacctgcagggctcaagtgattctcctgcttcagtctcccaagaagctgggactacaggcatatgccatcatacctggctaatttttacaattttttgtagacacaggtcttgctgtgttgcccaggctggttttgaactgctggttaagagatcctcctcccttgttctctcaaagtgctgggattacaggcatgagccaccgcacctggccagacctttttttaaaaatcattattttcagttgagtatatttggaacccccataagttactaggaaataactcttgtgaatgggtccttgttatagctggctgattgtgtgaacactgcgtttaaggtcttcagcatccagctgctttctgttaaattctacagcagctgtcacctcctcatagacaagacagggaagggtgggttagtgaacacttgatcccaactcttatttggatctgggctgctttaaagtgtgtgagagacagaggcaggaaaggtggacgtggacgtcggagaggatgctacgtgcagaagccatttcaggggccttcacgtgcatcccacttaaccccacagtaaccccaggaggaagatgtcatttccaccgttttacagagggcttagtggagggctaagtgaacctgctcacatccaagttactaacaagtgacaaagccagaacacaaacccaggcttcctgactcttgagtttaacgcttgttgcctgagctgtactttaagtcctagccaaataagcataactcaaaaagggaagtggtccacctggatgaacatccttgtttagttgaggcagagagaaggggacttagaggagggctgggctcaaaaagtctaagtttgtttctgtactctcatgataggtagctaataacagaggtcaaatcccattgagacaaaatgaaaaatttcttttaataaagactctaagccctggccagcgggccgcgtttctgaagcagaattctagtagcatgaaagaatgttgattaccccttggaatttgttagaataagaaaatttgttataataacatttagaatgttggactgtgttctctcggcagtgcatgagcttctttctaagcacagtagtcacttaccctgagagccacgggttgtcacttaactggttcagcctgtgcacactgggtaggggaagccaacttaaaggaccttgtgtctggtgcagtaaaaactgttaactccttggtaacaccttcggaacccctgaaacttgactccagccaccagttgagtatgagtcaccgggccatgccgtggagagaggagcagtagggaaaggaggttccttggtgaggtcagtggaccataaagtgatatgtttatcaccacggctcagactgcactgagcaagcttcatcccccacttcccagaatccgacctggctctacctttcttgtacccagcgatcgcaggccatgaggcctggttgctctaacccgagcagttctcagagtgtggtttttgccccagcagcatccgcatcacttggggacttgatggaaatgccagttctcaggcccaacccagaccaactgaatcaggaactctgggggtgggacccagcagtcagtgtttcaatcagccctttaggagatctgatgcttgctgacgtttgggaactgctctcatctatatacccagaatgaaagaatttaagagttttgctcttatcccagctggtcttgctgcgaggcttcaagcaacattgacttaccaccagagcctcagtttccacagcaggaaaatgaggtgtttgcattaccccccaggttcattcctgctctcagagtatatccttctgtgtctcaaagtcatttgtcaatctttccctaaaatacaaataagcatgtgactccccctgcccccaaacttgccaggtttctacccgggaattcccctttgtggtttcctttctacttggcactcggtataagttttgatgccaggcattcggaaagtcattggggagcgggggagaaaccacacacaacaaaagtggtcagcttattcaacttagtgacaatggcttctgggactagagcccttaataacatcaacttttgaacaattagacctttcctagtggcttcacatgagtgaatattttgttatttgtctcaaatctcacatcattgtttgttaattcaggaaacctataccatatgcccactatgtgccagatacaagccaggcacacctatgaactggatatgccggccacaatcccaggagggccctagtctcttgagttccagactgtcctgtccctggcccatagacgctctttcttaattaaatttcaaccttgccgttccaatatcattttccatcctgtgatgtgggggaggcatccgcagggctgcagctgcacggtgtgcatacctcatttgctcatctggcaaaaccctcagcagatgtggagggaggctgctctagcagcctgagtcagtggagccttgagcttttctctctgagggggaggggaattagaggagactgcagagtgcaaacccaatgctctctcgcaacgagccgacaaacagaggctttggtcccctttgttctggggtggtgctgggggtgctgtggtggccagagccatgatgccccagtgtgtgctgcggacctcagcacaagggaggttgcacaagtggggagggggagggacagtatcaacccagtcttgggaccccctggttggattccttactccaaagtgagacttccatgtggacttgaaccctggcatcctgtcctcaaaatggaaaaggcagaagtctgttttatagtagtgccaggcctctgattaattatcccttctgaaaaaagcatgctacacctagaacttccttgacactggtcccagctgtcacactgccagcagtttctttcaagttctgttgaaatatttaagcccgtggatggaaatcccatcagccgccgtgctgtgtaaatggcatgtgccgttgtgggagtgtcttcagattctggtacttgcatcactttcccgggtggaggtggtgagcaactctcagcacagtgagataatgtttgcgaaagcactttgtaaactgtaaagtgccatataaacttgagttgtctgtgttcagattgtgagaaagagtgaaagtctgccttctttatttcccccaaattcctacctttcatcttcagagtataaagtgctgtgaggaatacatatgagggaaagattaattctacatggggtgtcggaggattaattaggtggttgcttctcctgatagttgaaataacaaatatccaaggaggagtgcatttggggatagaatggattgaatgttaaatacgctgaccatgaaatacataagtattggatttttagataggagatgcttggtagacagatgacagtataagtcaactgctcagaaaaggagtcatgatctaggtacaggttgaaaccatgggagtgattgagatcacctagaaaaagaatgagatagaaaggggattgaggaaggagctgagaagttcttagccttggtttatattggaatctactacgagcttttcaaaaaagaaagctccctaggccccgcctgggtgttctgaatcagattctctgggttggggtctatacagattctgagcagaggaggaaccagtggaagagatgtgaaagataggtcagaggaaacagacgaggacaggaagtatcacagagaacatgcaaggagaagatttagccaaaagaggcccctagttgggggctagtcaataggcggtcactggtgaccataacaggatgcatttcagggcagtggttgcggacttcacagacgaagaaccatcctttgagctcgtggttccctgtgtctgccatttgctcagtttcactgtcaccctccttcctttgaatctggttaccgagtacctcagtggtttgacagattgtcctgtgcctctttcagatcaagtgttccctccaaagtgcaacatagggaagaattttctctcactcaattaccttgctgagtaccttcaacccaaagcagcagaagggtgtgtgatgtccagccagccccagaatgaggaagtacacatcatcgagctaatcacccccaactctaacccctacaggtaagtgagtctaagtgtgtgagtgtgacaagagatgaaagtaaagatcttccttgacttgaggcagggagaggtgtagcccgtcctacaccctcccctacgcaggagggaagggagccattgatgcttcacgcaggagggaaggtagccattgatgcttcaggtgtgcttcatcagatgtgtttcacagaagctttgaagaacagagtaaaggcaccagtggtatattttatattctgcatctgtccctagatcccagatatttcagatgaattcctgaagcctgttccaaacttctgggtgttaattacaggacacagtcactcttccttcatctttatcacctctgactaaggttatccctgataggaaaattacaaaatatgccctattaatataattatcatcttagtaaccttctgtttttaataaagctctgtttgtggtgtccttagagcgcttaggcactcagagctgtttgcgttaaatctgtgtgtgtgtgtgtgtgtgtgtgtgtgtatgcgcatgcacgtgtgtggtggagtggctcttcatggtgccataccaaagagccattcgatagaacttgcctctcccttgtgtgcttggtgtgtgtgtgtgtgtgtgtgtgtgtgtgtgtgtgtgtgtgtgtgtatgctggagtggccctccatggtgacatacgaaagagccattcgatagcgcttgcctctcccttgtgtgcttggtgtgtgtgtgtgtgtgtgtgtgtgtgtgtgtgtgtgtgtgtgtatgctggagtggcccttcatggtgacataccaaaaagccattcgatagaacttgcctctcccttgtgcgcttgttctccctctcagcttcctacccctggattggaaattcgaccctccctatcaagaataattagggaattaaagaaaaaggagaaaaagtaggttcttttcccacatgagcctgcatttcaccctccttcctttgcatctggactagtgacttgaaaatttaaatgtatattgtagagggatttcgaggtgaaaatgctaatcggggtttgactttcaaagcgtgtaagctacagatcgttttgataagattccactctggccacttgaagaattttgtagaaagtgaaaagggaatgggaataggagcagtctggtgaatgtgcttcgacgtcaggcctgaggcttcattggagtataccatgcattttatgctttacaagtgtgtaaagctgagatggaaagaaagactgttcccttaaattcagaatgacagggatgttattgtttagtaaaaaattctcttttttacgaattcttagaagtttgggttgtgttcatcaattttccagtaatcacttggttgaccatctgttttctttattttaataaccttatatccagaagtttgggaaagtaaatgcagatacgattctgtagcaattgttaatgacttaagcaaaccttatataaatcaagaaattctttagccttttgtctcttattttactctgaagtttcctaatttttttttttaccaccatgcttcccttatcccaacaccccgcccccaactcaccaaactgccacctacttcagttttgaaggaatttgagcatattagccaaatgggaatcctgtacatcgaaggtgttgaaggttgaaaaagcaacaatactgcttcaaaagtaaactcttctggttcgttcaagtccacttcaaacagtggctgcattaagtaaccacctcttttccatcaaagaagagaaaaactttagtgactaattatcagcaagcatatgtttctattgttatgtaaaacaattttgttatgtgtgcagtaacaatctgttttgcacatgtcattggcctgggatcaactccagctttttaatcaactggccagacactagaaacatgaagacttggaagaggggagatagttgcaactttctggcatgtaggtcttaactttgcctttgtcttccattcacagtgctttccaggtggatataacaattgatataagaccttctcaagaggatcttgaagtggtcaaaaatctcatcctgatcttgaagtgcaaaaagtctgtcaactgggtgatcaaatcttttgatgttaagggaagcctgaaaattattgtaagttggtggagcatgtcttttgttttgtttagataaatgacaacaatttaagctgtactttataagtgttatttttaaagttcctgcctctttggactctctaagctctgtcaattatttttcactttgcaaaatagcatgctcctataaaataggtgcggttgttcaaacatggccttggattaagacggacccaggtctgagtccaggtaatcccactgtgacctttggcaagtcccctaacctctctgaaccccagctccctcatttgtgaaattcctgaaatacattagtatgctttccactaatagtaagtgtaaagtaatgaacacaattaagccttcatattgagcatcccacaaggacctcagtgtcatagtaccgaatatcagcttttattttggagttaggtacttagagaaagtatggactattaggctgaccccagctcacatcattgacttttctttttgagttaaatacgaaatattggcatgtctttttgcttgcttccaactcctaagtgtgaaacactgatagaagaatcacagtaagtgcgaagtcagtgaaatgatgctggacaagtctactccagcttgttcccaaggccctctatttaatagagatgtacgcacaaggcttagcccattggcatgatgggcaaacagcagctggtttcctcaaaagttgaatgttgaaacttggtaaagtaaatcttatctcaaatatgcttaggcaataactatttgactgaattatattgaaagttaaagaaaaatcctcctccctattttttaagaagataattatctctttagtatctcttctatgggctcaaattttttttttttttttttttttttttggccaatctctcttttagttcctgcactgagtaagctgaagtgggttttatgttttcagtattttgggagagggatgcccttggttttggtattattcattcattcatggcaccttccatgtgataccacagtgagcaaagccaacagttcccttggcaacgtcatgtaaaagcactcaccagaggcagcaggcaaaaccactagcacacatattttaattttaaagtaatcgtttctggttcccgtgggttttttttttttttataactttgctaggatcccagtgagccatcatatgtaatggtgatacattaatttgttgtcaagcccaaagcctagccatgatctgaagtcagagatgttttgattgccttctctggcatggcatgaggggtgttggtgacctaggctgtctgctgcttttgctgcctggcacaccggccaaatgtttttaatttcagaataacaaaaacaggaaagggaatcatgctttgaaaggcaaaaacatacggtacattttaattccctgctggagttcttgtgtaaatattctttcagccttgacccttcgatggctctttccctgagtatgtgtgcctggtccatggcagtcctggagttcactttgaatgtccccatctctcatatgaatcagaaaggctagaaatgagattgctcatcccagtgcaagatctgtttatgttcctctccttggctgtacgcttgttccaggccaattttggacaatgcatgacaacattactaaacaattaggtaatgtttcatgatgttcttttttattctcccaaccagtttatgctttgtgattttctaattccctgtttcagatgtgaattctgactgtgctgtgagggaaaggtacctgctcccacaaaagtttaaattactatttagaaagggggcaatggtttatagaaaccttgtttctagtatttcctttagagacagcatagtgaaattgaaagaatcttgactttgtgccagacagggctagatttaaatcccatttccaattactactcctagtagatgttgtgcagtctgactgatgaacacggagtctgtttggtcacctgtgaaatgggtatgatgatagtactcaccttgagtttgtggttcattagctgagttcatttgtttgttcatttatttgccaaatacttgttaagggcctataggatatttcacctaaagcactggacacagggcctgcgcatgtaagttctcagctacatgtgttgcttctgtgagtcttaggttctccttctctaacaggaatggtaatgcctatctccttatattttggaagagaaataagataatatatgcctagcagagtgcctgccataaaaagggggttcatcttccttccataaataactctttcagagtgtctataggaacaattagggcacttctctatacaaggtgaaaagaaagaaagatgtctactaagggaattgtaaggagtctgatggagtaatttaaagaagagcaccattaaatatggatgtcttatgcatgtgtgtgtcgggggtggggcatgggcagaatgtgtcctccagatggcaaaatggtcaaaagaggtgcaaagagccaggcagtgggcaagaatgggaacattggaggtgtctacattgccttgtccagctctggctcttttctcaggtcctgtgtggaccatgcataatcacttttatggtaggaagaacctctaaaacataaaaaaatagatggaggaaacctgttagaggtttcctcttatattatttcatgtggcctcaggacttcagggttgatgatgggcagcttgttcttagagaatacatttttaaaaatctcagtgggcatatgcactacgctctctggccattcccttccttagtcctccctcccctataccatcagtccagatgtaaatatgggggagtgtggaggcacttagacttaactccttatctttcatgaagatatggctgggaaagatggtggtggtttttggagacctccttgtacacctgcatttggcgtagctccactaaagctggaaaaagcctagggacttccagaagtacagtgtgagaatttgctcaaagctgggaaccaacttgtctgccattgtcccaagccttgctgctttacaaatgtgtagatagatgttgagtcttttaagttcccagacataatcaaaatgagatgtattgacagctcctagatttaatctggaaaggtgcaaacagctcattccacattggtgcaaaaggacaggtggcagttatgatgatagtgttctggaaatacgatattttctcagctgtccaacaacatgaaagagactagggcagatgagggcaagcagtgttgtttaggccaattgttgtgattccagccaatcaaaatgacatgtagctctaaaaggctggaagaagctgtacctaagaaactactgttgactgaatgcataaaaagttctaagaataaattggatctttcatgatctcattttagctctttccttccttccttcctctttgtttctttcctccctagcccttctttaccctaaggagtttttttctgaattggagtaagagctaaaatattctgaatctattaaactgagtttacaaatggccgcagaagttggttaaagttctgtctggttcctttgcatatagaatttgtgactggtgagtctggcagtattcccacacataagcactttaggtaatagaaaaatatactgaatgagatcctttaagatttgagttgaaatatatgtggcttcagccaatatcccacaaccacataggccaagagaacttagagcctgtgaatcttttagggttttacagtgggaaaggattaatatttagtcatgttaggggcaaacagaatgggaaacaaatgaggaatttaggaaaaatgctgcatgcatgcaggagaaaatcactgggcatggaaattaaagtgatttttatacagcacgaaaatggtgtaatctgcatgctggaagggctttccagccctgttggtgcagttgttgaaaatatggtaccttccctttggggtcccctctgcagcatttagctctctcaccctctgagaagagcactgccacaggagtcagcaactgatgtataaatttaccttccatgtccttgttgaataacctggttgagtagagtccatttatatcctttcccaaaaatatttctgtcattttaattttgtaattgattatccagtgaaagctagtcttttttttttttttttttttttttttttaaggcagggtctccctctgtcacccaggctagagtgcagtggcatgactatagcttactgcaacctctaactcacgggctcaggtgatcctcccacctcagcctcctgagtagctgggactgcaggcaaatgccaccatgcctggctaattttaaaatttttgtagagatgggatcttcctgtgttacccaagctcgtctcaaactcttgggctcaagcagtccttccgcctcagcctccccaaatgctagtattataggtgtgaagtattgcacccatccctgaaagctaatcttaagacctacttgtattactggataaaacagtgatacttaaggggagagtaacctaaattaattaattaatatttagaatagaagatacaagtatattcagttagtagaattggcaaatgaatacagttatagaattactaattgatcatacattttagatgaaatataaacattggttgttttaccatgtggaatttaatagtttatatagatgggatagtctccacactgaagtacagtcttgagcatataatatggttcagtcagtgagggaccacatatacgacagtggtcttatcagattgtaataccatatttttactgtaccttttctatgtttagatgcacaaatactgaccatcatgttactactgcctacagtattcagtgcagtaacatgctgtgcaggtttgtagcctaggagcagtaggctgtaccatatagcctaggtgtgtagtaggctctaccatgtaggtttgtgtaagtgcactctatgatgctcacacaatgactaaatcacctaatgatgcatttctcaggacatatctccattgttaagtggctgtaagtgattgtgctatctttcattgaaatctaggggaataggaagtggaagcatgggaatttgagggcaatataacatgtctgtttgtatactttatatgtcattttaagtaaaaaaaagggaaagtttattatacatatgtactgtgtgtgttaataatttaaacattagactaactgtacagttatagactaggcatacttagtatgtaactacttacatgtcattggatgattttttttatcagcataggcaatacaaatagtatgatcaagcagcatacgtagatgtcttttagtcggctattaaaggtttttcacatcatcgttcttagcccaaggaaaacaggggtcaaaagaataaataattccctcatatacaatatagaatctacttatttaagatatttaatttttattatctaaagtactgtttaattttagactcatgagtgatttttttgctatatcttcaggctcctaacagtattggctttggaaaagagagtgaaagatctatgacaatgaccaaatcaataagagatgacattccttcaacccaagggaatctggtgaagtgggctttggacaatggctatagtccaataacttcatacacaatggctcctgtggctaatagatttcatcttcggcttgaaaataatggtaagttagaagttttttaagttatgtaaaaaataccccccaaatgaagcttttccagtgaggaactgtcatttcagcttatatgttgctgtttttctcttgtacattttaataatttgactactttttatcagaaggcttaaaattacctagacagagattttgaggaaactgtaatacagattttcagtgacatagagttgaatgcatattcagagaactttgttataggttatctttagtgtgattacattaggttcttctctccgagacacctaatgaccacttatggctgagaatacagaagagttaagactgcaggaaagaagttcatggtaaaaggctgtatcttttaggaaaatagtcacgaggactcatacttgagtgttcatacccagaggatggcaggagttactaccccagctgaatggggtggaaagcagagggtcaacaaattcttgaggttttctggagtcttctagctagcatgacttgaaaccctagttttgtgatccctagacctgttcctcagctcatggtaccaccactgagtgaaatgccaatagaataaggattaggagtacaggttcaagccccagctctaccatttagtcactgtttggggagaagttgcttcacctctgagccacagatttttcttcagtaataaggggaaaataataggacagaccttacagggttgttgtgaaggttttcgtgaaagtacaaattaaaaaccctacaaagctatgacttattttggacccttacagctctagcgtcctttccaaagaatattattaaaggagagataatgtccaactatcatcttcacttccagcttccactgagatggatttgacctcaagtgtacatcagttggccttagatagtagatataaagaatactggggaaattattatttttttagttgttagaaatacgacaaaatattgagtattgattgtatggaaatacgtctctccctttgaaggaataaatgtatctatgcagctatttcttatctttcaagggaatatgttccaaaaggccaaggtgcccagatacctgttaaaatttagctgtcaaaaagaaggtggtgaagtaattttaacataccaatattgtttcaagacatcattagagaaattattcaaaagactctcttgattcaaggaaagtattttagtggcatttcaatggaataatattgcatcatgtaacttaaatcacagatttttctagcttggacagccttagaaactgtctgttccattggttctcagtcttaggtgcacattgcagttacacatggagagactaaaacatattaatgattgggtaccaccccagagagtctgagtttaaattgtttggggtacaacctgggcgtaggaatattttttaaagctcccaagtgattttcatgtgtagccaaagttaagaaccactgatcatttccaaccacttaatttaaaaaattggaaaagcaaatttgaggcacagagaagcaagccgcttgcctaaagccactgagctagttagagagaacaccaggactagaattcaggcttctagacttctaatgacctttatgcactgcttattaaaagtcattttacacctgcccattctatgctaattcctcctgttctgcctgtaatgatgttggttgtggcctggcatcaaacactgctgatgttttgccttcttctttcaccagcagaggagatgggagatgaggaagtccacactattcctcctgagctacggatcctgctggaccctggtgccctgcctgccctgcagaacccgcccatccggggaggggaaggccaaaatggaggccttccgtttcctttcccagatatttccaggagagtctggaatgaagagggagaagatgggctccctcggccaaaggaccctgtcattcccagcatacaactgtttcctggtctcagagagccagaagaggtgcaagggagcgtggatattgccctgtctgtcaaatgtgacaatgagaagatgatcgtggctgtagaaaaagattcttttcaggtcggtgcagctgattacaggagggaagagaggctacctcctttcccatctggccctagtctgcatctgtaatttctccctatctctttcatttttgaactccggaggcttgatactgttttctcagttggatgggcctacttccccttggctgtgattctcacctggttcctgttgttctcagtgacagggggtgggggttccagatccttgtgtgtcaatattttgctattgaatttccaaggccaacagatactacccttgagctgttgagaggtgggcagctgggaagagatacttggggaaggggcacgatgcaggcctctcatcgcctgtccttggaagaccaggcaattgtcaattgtgtcaattatacaacagaactgcctgtgggcctccaaccatgtctttggtggttgttgttttaggccagtggctactcggggatggacgtcaccctgttggatcctacctgcaaggccaagatgaatggcacacactttgttttggagtctcctctgaatggctgcggtactcggccccggtggtcagcccttgatggtgtggtctactataactccgtgagtgttttccagaacaaagctttgccctttgccagagcctggctgtgtgctcccttaaagttagtcttaacatttctttgaagatgaagagggttttcaccccaggcctgaagaaagccaagtgtcagttctcaacaaaatggatgtactttgaccctgagctctttggttttatttgttttattggtgagtctttgggaattggaaggcctgttttctcaccccccgtttccgtctcctgatgacaaaggctgcactgtcaaggtgattatgacttctctcagtgcccaagctcaactggcccttataaggataaaattttaaggccctgggctatatgaacgagcagcacctctgcacagccgggttaaccagatgtgtggtctctctggcctcatttgagtctcgtccagaagtaggagaacttctccctccttcatgaataaaaatccaaaaagagaatttaaaactcaaaaaggacctttaaggaattattaagtctctctccacctctaagaaagaccatacattgaagaaactctcctacttttgaagttacttggagaaagattccacagatttcccccaatgataaaccgttgcaatagctaagctgcattttccagaaatctttcttctcagttggtcaaaatcttttcagattaaacccattctcttgggtgcagagactaggcagtgaatattaaaagaatttaaaatgtgaagttccaaaagaactttaaagtgctgattttgcattttgggttttacttttaatggtaaaaataaggctcagagatccctgtgtccacctttgacacagggtgggttggggtgggagggggggtgtcttcttagtgccatatccagctttgacatggggtggctgagctgtggctgctagttcgaccccatccagagaagagaggctagcaatcaggtgctctggtcagcgtggttcctgtgggaagtgactctcccatgaacccaagcatattgttcctcagagaatattagactgttggagcagcaaataaccctaagatgagcttattcagcttcttcatttcacaggtgaggaaactgaactccaagaagttaaaaagacttgcttttttaaactccagggatgggctaatggcagagccaggacgactgaatccaacttcctgacctcttgtccactaatctttcctagacaccaggctaggccctgctaatctccttttgttactcaaataattaatttattaacctttgacctcctgataattgcagcatgaattttcgttcagttatccagtgtctacagatataatgaatgtcatatattactgaaatacttgattatggcattttaaaactggggtccaagttaacaccaaaagtggctacagtaatatgtctgttaagaaaaaataaaaaaaaaaaaaagtcagttgcttcaggagagaaaggcatgtaatgatcccttaaagttcctttttttctcacatatttttcttttctttattatgatctttgagtttagcaatatcctagatgcttcctttaattggcgtcagtactttctttggaggacctggtacagagagaaaggcagtttgttttttttttttaattttcttcccatcctactccctttggagactgttttagctgttctcaccaattataattgtttgtagtaattttcagacttactatatatttctattttgcatcatgttcagaatccaagcatgtgaagcaaaagaaattaggatttcatttatggcgtcatgacccttgggtgaattttctcatcctatttagaaataatccaggaatcataatttcaacctatgtcaagatagattccgggaatatatctgcaggtggatagcgaaaaaggtggaaaaaaaagattcctggaataaaacgtattcttttccacatccatacaccatagagaaagatttcttagggaagaaatgagcaaaagttagaggggtacaagagcggcaatgaagagatgtgctccatagtaaacattaggtccttcgctgctgactccaaccaaactttctacaactcttaaaggatatatataaccaaacattaggtccttcgctgctgactccaaccaaactttctacaactcttaaaggatatatataaccaaagcttcttgtattcgccaactgctagtagttcttagagtttataatataaagactcttaaggggaagccccttctcacggtataggcaagtctcttgacaactccattcaactccattctagtatctagtgttttcccaccatttgaaatcatttgtaattattcaatatggttacaacataaatatttatttttcacaagagaagatacaaatattagtttagcttttaacttgaacctgcattgggtttctccttattcttcatcactttgaagatataattcgaaaaagcctggatgttattttattattttgtcttaaagtcagattttcaatttgcatcagaatgattacatgagtgtttgtgtgaggcagaaccaaacacacatggtttggtgtttttataacattggctgtgctttctttgccttttagattgtgatacaggttccagcccttggggacagtagtggttggccagatggttatgaagatctggagtcaggtgataatggatttccgggagatatggatgaaggagatgcttccctgttcacccgacctgaaatcgtggtggtatgtgtttgttatcagtagggggtttgtggaaaatgctgtctattttgttggctttagttagggactatctgaaaataaaatcagatgttaaaagccaaagctcatgaagctacagggccttcatccttcatatgactgtcattaatcttcctgtgggttgttatttccagtttaattgcagccttcagcaggtgaggaaccccagcagcttccaggaacagccccacggaaacatcaccttcaacatggagctatacaacactgacctctttttggtgccctcccagggcgtcttctctgtgccagagaatggacacgtttatgttgaggtgagacctgaaagttagccttgaccttttaggttagtgctgggctatagttccttagacatcagctaaaataccctgtacagacctcttcctgtcctacctcacagaccttcaacaggtctgatgagggattggctcagagaacgcttccagactgacttctgaccaaagcaggaaatttcaagatttaatacattatgctaagtgaagacagtattttgtagatgaatgttaacaaaaaaaaaaattggcaagtgtgaattctactggtaaagccctgtcctttgcttttggaacagtagttcagtagttgcagtgttagagttaaccatggaatatttcaaaaccacctcatatgttatcttttatttctttttttttccctgcacagtccccttagcccccagcagggcagccaaatccctgtgggtccatgccgccactgaaactgacttgttatcttttaaattgcactcacttttaagtgaaatgctatgtgctattataactcatgacatttttttttctagatcatgatctgagtatctgtataaacttatttaaactatttcctatatataatgttaataatcatgtgcaacctaaatctggaatctggagtgactacacaatattaggcagtggcggtaataatgaaataacaacatctaacatttgctgcagatttattatgtgccaaacagagttgtaagtattgcagcagttagttaactctttagagccatcctataagggaggctaataatatcttcattttatggatgagaaaattgaggcacaaatttgtctgaggccacacagctggtactagtggagttcagattcagtgctcataggccgtgtgactccagagctctgactgatcttcgctggatacgactatcacttatctccaaagtgccatttgaaaggggagaaaacataacgtcttatcaatgcaaacatccaggttcagagagtggattctagaaaagataaatgtccttatggcaccaggatgtctgctgtttcttgtgccctgggtacaacctttcatgtttcaaccttagtgtttcaagtgggcatatcatctgttggtcttatgggaaggtcctcatctaatgagctggttttggtgctcagctgcaagctcagcttcatagtgggaggggtgagaagcttaaagggtcaaagtggggtacttccatatgttaaaagtgactttggtgcacgtgtttctgttttggaaagacacataactctcacattcgcactgactctgggacagagcccgctggcgctagatgttgttttccttgatcatatggattctgcccctcccccattctgagagttctctttctttgagcacaccttctttctccattggggaaaatatactgccttctacatgcttttcctaagccaagatggctgtttttctcttgcttttctggctgtacagttcacatgggcagttggtcaacagcaccctattgcgctgtggatttcaggggtgctgcataattgcagattgttcttttccaaatctatgcctggctttgctgatttatgctaatcagtggtcaatcttcctcctgtaccttaccctggatattttgggttttttcccccatccttcaaatgctggcttacttgaagtgtgttattggtagttttttttttccattcttgttttcccatttataccttttcatatatcacctatatttctcatagtttatcctctattccctctacaccatacagtccctttcataatccaagttaacagtgttgccacctgttcattggtcatctccaggtgactgttggtcacataatggcagttttcttttggttcatttgtcttggggaatttacaaacccagttgttaataacccaaaattttaaatctagaatactactattactaataggtagcatttattgacactctgggaactgtgttgtttgcatgtaacttttactttgctagttttcacaattatgatatcttgtgggtattcgtgttctcattctgtaggtgagtaaactgagtctcggtgcccagcacgtgagcaggagagcatgtaatttttatgagctcgtctcactacaaagcccgtagtccttctcctactcacttctggtctaaaagtaaaatcctttttagtaaaagatttgctgataatttatatatataaactatatatacataaaatatattaaaaaataatatatattttttccctctgctacaaaggtatccctttttgggataccttagacattctgccgctacatactttcttttgagattagagaagagatttgcagtccctctgttacacattttggcatgtggtttctgagttcatgttaaacggcagtttttagtaatagcacatatgtaatttgccacctttccaagatagaatatcttgtttttcagaagtattgcaaaaatactgaagtgttagtatttacagaatgtcaccacagtgacattatcagaatcctcttcattagcattttcactgttgagtgtcctgcagttaaccaccacgtaggaatctttcacaacagtgctgcggattcaaagccccatgtgatgtcaggggtttcccctgggtatctcagcgtggaaagtctgtttctatctccatgtcttttgaaatgattctgcggctgttggtctatgggtaaggactagctgtttctacaagtgtttaagtttattttgatcctaaatttagtcaaagaatgaggcatagcagggaggggcagttcatgcagtgatccacgtgtcaccaaatggagaatctcctctggtctggggattttagctaagttcaggatagttgaggtttgaattctgtttacacttggctaaacattacttcctgtttctaaggaaaagaaccttaacaaaatttggacgtagcccatacaagtgttttcaaagggggaagtataaatgagtcggaaacgtttccagattagatttcccctaaactacccctgggcttatggagcgaagggggagtacttggcaaggctgatttggatctgtgagcagctgggacactttaccaggcccatgatggcctccaggttgcaccgtcactgacacccagcgccggagccagctctgccttctcgccgatgaagcaggactctcatcaggcttactctgactttttgcaatttagaagctcagtcttcctgcctaggttaaatagattttgccgctgaactctattttttggtcagtctttaaaaagagcttagcttataagtgttgtactattaaaacattagggactttgcctactggtgttttatttacttcggaaaatccactttaaatgcaaaatatgtttttatttttagctctcagaggactcattgggaggtggaagagacttactcatcttgtatttgaatctaatggactaatatttgaaagaaataattcactgtcatcatctatatcaaattgaagtggaaaatatctttttctttcaatgtgtgtgtgttacttttgtaattagaaagaaggctataactatgttatgaagataaagcagcgtgtcatctgaagggctgtcttggcatatggtccttgtgcctaaagtgaaagtgagatgctaactcatttcctaattcatctttctgttctttcataggtatctgttactaaggctgaacaagaactgggatttgccatccaaacgtgctttatctctccatattcgaaccctgataggatgtctcattacaccattattgagaatatttgtcctaaagatgaatctgtgaaattctacagtcccaagagagtgcactttcctatcccgcaagctgacatggataagaagcgattcagctttgtcttcaagcctgtcttcaacacctcactgctctttctacagtgtgagctgacgctgtgtacgaagatggagaagcacccccagaagttgcctaaggtttgtgggccttcatccattcggatggttattttggcatttttaggtgaggcagaaaagtttaatcccaaggtcttgcaggttgaggttttttgttttggaactgcccaactgaaatattaaagtcactattagcagggaactgtgagttttatggagtcttagataataaatcctgacagcatgagtttcttttttccatgcgtgctacttagtagtaccttacgagtgataaatcaagacgcttttccatggagggagatttctggctttatctttgcttttcagatagtttgcaggccaaaaacacagcaagccgaaaggacaagttcattgtgagaattaatttttccaggtcctgctgggactggcattgtcattgttttttaaccttttctgtgtgaaatataaggttgacttgtctcagggagacttctaggggaaactaacaaatattttagcttttctcagtttcatatcagttcatcatatttgcctcctgtcactctccagattgaatgttctattgccataacaaaaagcagaaccatttgaccttggtggaatgcatttgataggggagatctgcaaggttaactatgatacccactaggttggtcttgtatatgaaaggtatcttctgccatagttttgtttctgtgatctgccataattatgtataatttcatatgtgcatttattctgtggctatctcacacagagtaaactgatttccagtcctttcgcagtcatatatcaatgtctaaaaggctaagaatcaagcagtgttattaataatgtatgtatggaattttctcatttaactcacagattttaagtcttaggtatggaggtaggaggaaaaaccaccatttccaaatagattacaattgatctgaattccttgcatcattatagtcccctgggcatccttttctctgataacacccaagagaattttgtttgcatacgaaaatagagcagatatgatcataatcattggggagcacatatacagtgatttagactatattcctaggtttgcttttgcggcggtgatgccttagccttgtaggcattcaccatcagggttggggcttagtggacagtggtagagagccatgaggagcttcatgtgtggctgtgggaccagctgcttcctgtgggcagaagggtaacgtttaagggttagaggtcttggaggggagacctagcagttaccagggatctttgctgtggctttggctgttacttctctctgacctggcctggaacagcccagcttcatgtgtgttaatctgggaaaattaatcgtaaagagagttctaagcctcaggggatgacatgatgggatataaccctaaacctcaagtcgccctttacccccaaggtaagataacatggaaagagcctgggactgagaaggaagctctgctgccaccaatgggactttaagccagtctctggaccccttagagcctgtatttcctcatatactgttataatcatacctggcttccctcctgggtagaggagcaaataggacagtatgtacaatgacagccctttatctggcagaggcttggatgagctgttaccactgtctttctgtttgctgcttataggtaatattttcacatttctattattttctgagtgctttctgtgacaatagagagcgccaaagaatcttctaggaagagatctcagagattgttgagaccaaccctgccctttgctgatgaaaccgagacccggagagcagagtgtcttgcccagggtcacactccactgagttaaatgcggaatcatagactcttgcttaactgaagagctcaataggaaagtaacagtaaactaaaacaggaaagcaaaatgcaactcttttcagtcatcatgcctctccacagaaaatttgttgtttttctttacaagagggctcttgttaaaggcttttctctttttgagggggtaagagtagggcagtgagggttgtcttataagaagtgtctgactggcatgttgctcagagcagcaatgacagcaaggcctaaagtctttgctcttttgtgtttggaaaagatggaacttgattagctttttgggatgcctgctatagacttaaaatgatggctgtattaatatgtcttcttaccatagaagctgtcatttactttagagttatacctattaggctgggcgtgggctcatgcctgtcatcctagcactttgggaggctgagcttggcagcttgctgggagttcgagaccagcctggtcagcatagtgagacccctgtcactactatatatatattagctgggtgtagtggtgcacacctgtagtcccagctactggggaggctgaggcaggagtatgacttgagcccatgaggccaaggctgcagtgagccatgattgtaccactgtactccagcctgggtaacacagcaagaccctgtctcaagaaaaataaaaaagaactatacctattgataaatatagacaagaaaacaaagttattttaaagaaaaagtgcggagtgtgatcatattttttcaaaacagatgtagtgggcctgagcatgctcattaataggtttgaagcggctaatctcatggcctccacaacctgggcacagcccccaggatctgcattttgaaacattaaaagcagatgaccctggaaagtttagttttacatgagcctataccaggattaaaaatgaaacaaactcagcaacatgattatcttattggagaaaaatgtaaaatctgtcaccttcataatgcagtatagacagtccccatacaaccattctgtttttcaatctaagtattcaataaattatgtgagctattcaacactttgttatgaaataagctttgtgttacatgatttttccagctgtaggttaacgtaagtgttctgagcatgtttaaagtaggctggactaagctgtgttgttcggtactttaggtgtattaaacacattttcaacttagtgatattttcagtttacagtgggtttgtcaagatgtaacctcatcataagttgaggagcgtctttatgggaaatttcccacaatcaccaatcacaaacatgaaccgtgtatatgaagcccagcttggtgaggaccaacactaggcatatagtttttctgtttttcaaactaacactaaaatgtttagttttgtgagaagaaggggagggggaggacaatattgagaagctatccagtgatatttgcatcttcaggtacaaccaaaaatccactgggcctgctgtcatatctcccaggttatttggtgttctctgaaaaacacccaccttcttgcttttctgtagtgaacagctgtgtgctgtctgataaaaggccacaggacagctgtgcaggtagagctggtgaaggcacttttgagtggcccctgattctgtgctttgttctgcctgtctgcagtgtgtgcctcctgacgaagcctgcacctcgctggacgcctcgataatctgggccatgatgcagaataagaagacgttcactaagccccttgctgtgatccaccatgaagcagaatctaaaggtgtgctttgggaggcacgatcagagcatggggcctgagctctgcttgttaagaagacccaatagtgtaaatcaaagtccagctttattcacaagataactaaagggccagttagttactttagaagaccattttttgcccgaagagtcttttctttagctggttctcttacagccattatggcttagttgtaagtaatctatttgaaaatgatttcctctgtaaaaagaatcaggtctaggttgttcctgtcataaggtcactctcccttgcattcaaatatgcttccttgagtatgcaaaaaagggttctagttagtcccatgtcccgggaattgcacacaatccacagttcatctttctgtgatctactgctaaagtttatgctggctataacctattgtattgctttatcaaaattgcaaatgcctttgagaatatgtgaacattattcatcttaggtgtaacagatgagaaccactgcccaaatgcatcttaaaattcagttttcagaattttgcacaatcacatttgttgcttggagccaagcatgcctctttctccacaagcaggaacattcagcaagctgtatcttctgtgagaaaaggaaggctgtgccctaaggggtgtggcatcagtacctgagaggacaggcagggcagagccagacctggcatgggtctggccagccagagcagtagagaggcagaactgggccctaacaaatgttaggagtggatatgaggccctgtgggcggtgagaagagcatctgacaaggacccgcatcacagctccaagggttataaacaagcaaggacacaccaggcagctgtcagcatctgaggggtggaaccaaatgtcacatgggatatctaggcaattacagttgtcaccatctagtaacattgatatctaagggtgtcaaactgagagaaggctgggagagtgaaagtggattccaagcggggttagatatttcaggattagagctacaggctgcctctcgccactctgaggggcacagaggagcctgggcaccaagggccttgacaaaagccagcacactgtctggctccagtttcagggtattagctggaaggcctgctgggtggtgctgacaccagatctagggtttggtgtggccctgggatggcattcctgatctgagcatgttggattgggatttggcaagactaggcagcaggggtgacccctggacagtgggcagaacctaccagaacagaggcatgcaggtactgtctagtgtcttattggttgactaacctctgtgaaaacagctgtgccattccaattgtgtatctggtggtggcatctgcccccttcctatgaatgaatgtgctccctcaaaatggcagaagagtataggtggcaggcacactggattggagctgggagcctaaggcactgcttttagctttctctgctaactggctgtgggacattggagaacccccctaccaccagctctttgggtttcattttctctatctggaaaggagaggtttggactgggtgacttccaaaaggtcctttcagttgtaatactcaactatgctgtttgaagaagcaaaataatctttaattcatttttctggccgtcctaaagttgttgtgaagtgtacatgagatgttctcggcaacatttttgttgttgtttgttttacttttattgattggttttcaaccatttgaaagttataatagacccagtctttatataaatggatggtccaaatagttcctttttattgggttcaggagaaagaaataagaatataaattgtgttgcagagtaatcacaattgggcagcagctggctccattttgtactatgaaagtgattttgttaccagaaaggagtcccaattcagaccccaatagagggttcttagatttcacccaagaaagaatttggggatgagtccacagagtaaagtgaaagcaagtttattagagacgtaaagaaacaaaagaatggctactccatagacagagcagccccagaggctgctggttgctatttttatggttatttgttgatcatatgctaaacaaggggtgggtaattcatgagctgtcctagaaaggggcaggcaattcccggaactagggttcctcccctttttagaccatatagggtaacctctaggctttgctatgacatttgtcaactgtcatggtgctggtgagagtgtcttttagcatgctaatgtattatacttagtgtataatgagcagtgaggacaaccagaggtcactgtcattgccatcttggttttggtggtttttggccagtttcggctggcttctttactgcatcctgctttatcagcggggtctttatgacctgtatcttgtgaccttctctcccatcctgtgactgagaatgcctaaactcctgggaatgcagcacaataggcctcggcctcattttacccagccctattcaaggtagagttgctctggttcaaatgtctctgataatttaacaataagagcagctacctcggattccatctgttactcgtaactattttgagagaggtaattctgctagtaattgaaggcagcggcttgctttttcccatgccagacaataattaggcattaatattgccgcagtataacttccagcaattcatccattcttcttttgagcctggtgacatttttctaagtaatttctcttgcaaattaggtaattacttttatttaaacttagtataattgtactgaaagttcaatgttttcttgtataaaagttcaagaggaaagttttaccaaatatcaaagcaattttatgagatttgctaattgagactagattttagttgagaagcatgtgggtgaagaaagtttattacttaggtttgttaaataaattgaggcggttaaactgtaggccagcttcccaggggctgtatgcaaatttgctttctaactttgcgcttactggggtaagttttctggcaggtttcagctgtgtgtgactcctctcaccttttaagtttattttcttttgactctaaatcatttatcctcaatgcagaccactggagtctgtgctttctgcctcaaggtgaattggaatagtcatttgaaaagagactgtgggctgggcgcagtggctcacgcctgtaatcccagcactttgggaggccgaggcgagtggatcacaaggtcaggagttcaagaccagcctggccaacatggtgaaaccctgtctctacctaaaaaaaaaaccaaaaaaattagccaggcgtcatggcacacgcctgtaatcccagctactctttaggctgaggcagagaattgcctaaacctgggaagcagaggttgcagtgagccaagatcgcgccactgtactccagcctgggggacagagcaaaactctgtctcaaaaaaaaaaaaaaaaagaaaagagactgtgaccatttgcctaattgcattggtttatttgaataataacaggtcacgaatgtccttcctgtcagacagctttatgtctctttattgtagaatctgtgactttttgggtaaaaatttcctaaccaatgggacgcttcactgtgcttttactacacaggtgctctttgaaggccatgccaaaactccagctctctctggtcatttggttcatcttatttttcaacacttggattttctgggacagcagataaaggctctggttggcaacttcacagctgggcagagagctgctctgtggccaccactgccaatagcattgacatactttagtgtttcttctgtggacaggaaagtaggcaatcaagactataaaaatgtttctggattcctcctctgggccactgtttttaatggaaccttcctgagcacatctttgccacttttgatctctaagtcccttgggaatcagtgttgggttagcgttcttttaccatttaaatttttaacaatagatgaaagtttaaagctgatggtgatgatagtgatggagatgaggatgatgatctaacatttgttgagcatttactttgtgcaaggctctgtgctaaatgctttatgtggattattatattttatcctcatagcacctctgtatagtgataacttggccaagggcacacaacatataaatggtggatctgggattcaaattcaggcactgtgattccagagcctgtgctcttaaaccctatgccttattccagatggaggttgattctagtttttactgaaaactagaatcatgtgcatctatgtcttcacacccctcttcctgccccacttctcccttttctttctttctttctttcttttttttttttttttgagacaaagtctcactctgtcacccagactggagtgcagtggcgcaatctcggctcactgcaacctccacctcctgggttcaagcgcttctcctgcctcagcctcccgagtagctaggattacaggcacctgccaccacacccagctaattcttgtatttttagtagagatggggtttcaccatgttgcacaggctggtcttgaactcctgacctgagatgatccatccacctcggcctcccaaagtgctgggattataggcatgagccactgcacctggccctcttctcccttttcataccatatcacattagtattcaaggtaacaccccaaataccctaatgattatgaactaaaaggaagatgaaggattttaggaaaaatgtctgttcacccaaaggattaagatgttgggaaatgtgtaacctgtttagcagagtattaaagttcaggagaagttctgtgattttcagtagtaactcagaaagcccagagaacataaatagtttatgcatattatggtttatgacaaaacatttaaaatagttgaggtggtgccatcctaccctattttctgaaattttgaagtataggcatattagtgctgtttgccttggattctgtgaccgctttttacagcatttgagaacacttgggcttatacagtaaaaatgattacaccacgtcggtgatgattttttttaaattgtgaaagagaggagtaaccatttctctgaaacagtgcacatacacagaagagcatggatgtggatgtcatcaggagcaataaatatcattccaaaatttgccgtgatttacatacctatagatgtgtttaattcttagcaagttaaatgtttgagatactgaattttctccgtattttcaccacctaactttaaaaaataaaaatgcctgcatatcttggatactcagtaaatgttaatttcctccccttcctctcaacctctcagcaaactagaggttttttgggaagggagggttgaggaagggaaagttgtgaacgtcagttggaagttgatccaagagaggcattactttttggaacacatttgatctttccagaataaaaatactctaaaggaccagccaggttttgtcctcgagctgaggtcgaggtgaggggaaactgagtggaaagatggtagaaatgcttaattgacagaccagggcattcattctctatccaagaagggaaggagggatatcatatttttttttttaacatcgtgtattttacattatttatttatttaattttgagaaggagtttcattctgtcacccaggctggagtgcagtggcgcaatctcggctcactgcaacctccgcctcctgggttcaagtgattctcctgcctcagcctcctaagtagctgggattataggtgcctgccaccacgcccagctaatttttgtatttttaatagatacagggtttcaccatgttggccaggcttgtctcaaactcctgacctcaggtgatctgcctgcatcggcttcccaaagtgctgggattacaggcctgagccaccgctcccggccagtattttacattttaaaacctttttattttgaaaaatttcaaatatatacaaaaatagaataagtctcaacaattgccaatttatggtgaatcttgttttatcactttctgtcatccactggattgttttgaaggaaacccagacatttaatttaatttcatccatacatattccagtatgtacctctaaaagttaagaaccatcagaagatctcaagcaggaaactgatgattaggtcatttatttttattttattttattttattttttgtatttttagtagagacggggtttcacagtgttagccaggatggtcttgatctcctgaccttgtgatccgcccgtctcggcctcccaaagtgctgggattacaggtgtgagccaccgcgcccggcgattaggtcatttaggaaggctactctgaaaatggtgtgaaggttgcattgctggggaaagtactcaagaataaaatatacgtgatatttgtggttatttattcaaaaaaatatggtaggtgtatagtggacaaattatcttgtctttaaggcctttacagcctagtgcaaagtttctcaatctcagtacaatcagtgtttgggctggaataccctttgtagttggggggctgcctgtgtgttacaggatgttaagcagtgtccctggtctctacccactacatgctagtagcaacaccctcccaccaccagcccagttgtaaccattcaaaatgtctctagacgtttccaaatgtcccctggaataaaaatcacccaccacgtgagacacactggtctagtggcaggatacagataagtgaacaagtaattgcaatgaatatcataaatattgaaagaatccagaaaaagggttcagttacagtgacgttaagttagtaaaaactctgtcttaaatggggcctgcacaaagacctcctgagtctccaggaggaatcttcctctccccattcttctctttgccaaatgccaatagatgtgggtaccagttggacgtcttgtttcactgtgggcccactccgtcctatggtgcctagtaccaaattgagcactaaaggccaaaagctgtggtcagttactcatgcataaccccagaaatatcccgtttatgaaaaccatgctgaacaatctgaagaggggaattttggttctagaggtagaccaaaatttgctcagcgtatatgaaaagatttaattcagaacattgattatagtttgtcctttctgtaaagaaatctttattgttacagttctctttacagcaatagctaagattcctttcttataatcttaatcttatccttaaaccaaaagtaaatattgttgagtccactcttttcctctcagcatgccaactcgatggtagggttccggtggagatcaagccattttagttatactcaggggttcttagggattcgggaagagaaaagttcgaggatagaattctttaacctcagttctgcagcttctgcttgttattgtttgtgctcagaaatcacgaagagacttcacccaggggaaatgaacaacaactgtttctgtttagctctgtgagaaggctcctatttggggtgggggtaaaggattagatcataacagaaatccattaagaattttaaaacaatgccatccatcacacaggccttactataaaacttaaactcttacatgggaggtctccttaggagagagtcataatttttcaaccgcttggggattctgagtgagaaagtttaaccatgggtggttgattggatggaattattcccagaagtgtgtatatttcttacatgatgcatcttgtagcaacctttaaatgcctttgaacttagttcagggaatcaaatactacgtcttgaaaggagaagtttgtgggtagatactcttccttcatagagttcttgggagtttaaaatgagacaatataagtgaaggccgaaggctttttgtctattgcaaaacaccatacaaatgtacaaatgtaaggcatcattgttgttattggtgccaatgaggctgatgggacccagctcccagggtagtgcattctgtagttagcgtaattagtgtgtgttctgcatactgaattagattttcttaaaaacatacaatcatttttattttcttagtaattgtatttaagtatacttttgcatatatcctcattccagggccactatgttgcacaactccagggggcaccattcaattgtggtggctctgattcatccagtagcattccttcccctagagccagacattgataactcatgtggccagaatgttgacccacccatcggagatggttaatcctgagaatttacaattctgttttcttttatcctgtctagcttctttatttttatagacatcaattcagatgctgcttgtttgggtcacattttcccaagttctttttgcttccctgtgaattcagacataaggtgtgtgttccttctgtggtgaatgaaaatggagatgaaaagagaggtgctaaacatgtatcacttttaaactccaaagagtagggtcaaggtctgtagcaggactcagcacactttttctgtaagggaccagatagtgattattttttatttgtggctcatacaatccctgtctcaacaactcaacgctgctgttacagcatgaaagcagccatagacagtatgtaaataagcatagctgcatccatataaaacttcatttatggagtcaatttgaatttcatataattttcacgtcatgaaatatccttttttgatttttaaaaaatcatttcaaaatataaaattcattcttagctcatgggccatacaaaaataggtggtggaccataatatctcaaccgctggtctcagcctcactgctgaggataatgagtagctgtgcacaaatagttacttcatcagtgcttccccagctagggacagagctacgctcaccagtcatttagcctgctaggcagaactctggaattctgattcaacttctgccctgatgctttccagctgtgaccttgggctctagtcacacgatatcagagtctcaggctgctcatttccaaaacagtgatacaaaatttttttctgccttcttcatggcactggtgcaaactgcatatgaacgtcttcatagtctgattgctggtttcctctgtggcctccatttgcaaaaagtacattaacattttaatcatccttcaccaaacatttctggaagacctattctatgccagtctgagcccttggggatatacagatgactgagaactagaccttgccctcacagcaaaaaaaaaaaaaaaaaaaaaaagcaaaagaaagagaaaaagagagagagaactaggaggtattgtggcccaagtgtaacagaggagggatggaatgagcaagggtgggagagactagctctgctgggatggagatggaacagtgggagactcagcaaaggtcccccagagaaaatgccaacaaagcaggtctggggaggagggtgtcttgggatggcttgcaaagcatgatgacaaagagcagcatagagaatttgggaagcttaaattactaagtatggggagcccaccatgggtgaaggactccatcaggaaaggaggctggagagagaggatagagaagggagggagaactttgtgtgccatgttaaagagtgtggatttttttccctataaaggaaggagagtcatcaaggggtttagtcagggttataacatgatcagctctgggctctagaatattcactctgggggcaaatgtggaggaggaaataattggggggagggtagtggtggagataagggggcctctgtgataatcctgatgagcaatgaaggggagttaaactataggataatagcactaaggctaggagaacaaagatacttttagaaaatgtgtatattaaattaaaagaatattttgaaggctgggcgcagtggctcgcgcctatagtccctcggcctttgggaggtcgaggcagatggatggattgcttgagcccatgagttagagaccagccagggcaatgtggtgaaatcctgtctttacaagaaatataaaaattagctggtgtggtggcacatgcttgtagttccagctactcgggaggctaaaatggaaggattgcctgggaggcggaggctgcagtgagctgagggcgccactgccctccagcctgagcaacaaagtgagaccctcaaaaaaaaaaaaaaaaaaagaatattttgaaagcagaataatattagactacactggaaaagcatggtacttaaaggtattgaatttttttgtaagtaaataaaaagatatacacaaacacacacacaaattgtcggacccaaattccctaagtttaggtgtttgccttcaaattttcttcaaattggagagcctatgcaactgattgtcaacaaaatgcaatgcttaaaatttctgggtaactcattatagttttgatatctaaagaggatcattgacagagctttctcacagtatttattaccaaatggaaaagtgtcagtttctgctgagactttgatgaccctttgcttaaatcttggttctccatagaatacattgtgatttatgtttttgtttcagaaaaaggtccaagcatgaaggaaccaaatccaatttctccacgtaagtctttatgcaactatttcgaaataaaacctcctgggctttcctaagaatgagttggttagtgaacatttgccaaactttgagttttgataaggagacttctgctctcattcccccttcccccttcccctttcccctttttgctcatattttttcctttcctctgtcctttgtttatccctgctttctttttccctttcacctttaccactttaaaatattaatttgttgatccattggcatgtatggcttgaatgggaaggtagtaacttatttagagagacaagttaatgacttgcatgcttatgtctgctctaacctgcaagaattcacatacagccatggaagtggtttgctttaagtcttatcaacaatatttatctgctcagaggcgtaatgctaagggaactcattgctatactttcaagacaatccgtagtgcaagggctgggggccccaggaagagcatgtaagaatgaaagagaaagcaacaccaattgctgcagaataaggacttggaaattgtctaggccaatttcattattttatgcagaagaaaatgctgacccagaaatattcctgcctcattggcattgaggcaggacttcaacctggacttcccagctgtccacccagagctcttctagataatgttgtcttgtgaggagaatttgtgaatctgtgctttttttcctttcctaagattcccaggattagtctccgtggctgattcactacatttaacaatcagtctggaaagttcctttcacaaagcacttcataaaccattgtcttaagtggattattttttttaaattatggaacaatatgaactcaaacagaggcacatatggacacatatctatctttggagatttagaatagtttcattaaaaacttgtaatcatgttcaatttttgcatctgtgggtataaaaaggcaaatcatcttctaatatcagttttaaggactagattaaataggttgatggctcggttcaacttcacctccagggagctcttcccacctcttcctccacctgacttcagcaggtgactaaagctatccgcatttttcagaaggtaaatgaacacaccaaagagcacaggtctagaagagtggggaccagaacttgggagttcggatccttccagacttgttccaccacagcatactttccccgagcctttggagtgctgggctgcccaaaggtcacaggagtgtatggcagtcttcaatgtaaaaaaaaaatagctttctttacactgaagtgagttgaaaggcagggatttaatttatacagagatcactggagttgcttctgactggagcagaaagtagaaataatatgataatagtggggagatcctgtatttcccacttatattcaaaacccagagaccttagaaattgtattctacctaaaactcctcccccttggaaaccaattttaactttttataagtgactcaaagaaggtagttctcttaaatgaaaggaaatgttctatttctggggcctggaattaatttcaaatataaaaacctttgccaaatggagaaacaattggttctatttatatgttttgctgaccataaaactgacatcactccccactgggaagtatttccgttccccttatagaaagatcatggttggaaaagtgttaaaaagtaggttgttttaaatgatacaatatgaagctgttaagattaagagtttaatatgaggagatcggtgaaatgttataatccacaggaatagtttatttttattctatattctcctttctttctgttatctttcatacttgtaaatgttcacaaaaatatgtgtataaagtattctaaggtgtgtgttttctgtgcagtgtgtcatttttggagatgttcagtgaataagcagcagtaagccagattttgatcatggaagttcactttattttccaaagcatcttaacctgtgaattttcaagctaccctccattcaaatagtaggtccttagagtgagacaatgagatgacagacaagattttactgagtttgcaaatctgattttttagttagtttgttgatcaaaataaattgcaaactgagaatactttggaaacctgataatttcatttaacctttgaaaaaaatttgcaagttacaaaatacagtgtattttattggaatcttcattgcattctccgattttattagtgctcaacctttatgacagtgcttgtgaaacaaatataaaattgcaatgcatgatgcagactaaccaaaaagttgtgtgtatcggtttctctcctttatagcaattttccatggtctggacaccctaaccgtgatgggcattgcgtttgcagcctttgtgatcggagcactcctgacgggggccttgtggtacatctattctcacacaggttagtgtgactgttgagtaagagttggtgaacagcttgtgttcctgccacacaatagacactcagtgttttgttggatgaaataacgaatgaaagagaaagttcattcctactatttttacatttacatatttggtataaattgggtttcacaaaagtataatttgccataaacagtggaaagaaaaggaaggtttaaactgtgctaattgcgattgtgatgttggtgaaatttagccgctaataaagctactttgttgttagagtttaaggttaatgcagacaacgtacagaaatacaaaccattccgtcaaaaccaaagacttaaggataggcatatacatgagaggaagtgaaaaagaaagccaagattttattaccacacctgccaaggtattgagcactgtccatcagagtccttaatcaatgacttaaaccagattttctcaacctttttttaacccatgctatgtcttctttgataaaacataaaattttcatgtttttctataaagttaaattttctaaatagatttccatgaactgaaaaaaaaaaaaaaagtgatgaaacagagcacttcattttcaagctattatccctcaatcttcaaaattcagatgtgctcctccctaccaatcccaaggttgaaacatactagcctgatgagagaacctgttctgaccccaatacagaatgcaggccagcaaagggagtctttagtgcaatggagaaagaacaaatggattgtcctgctattgattctttcttagtttcctttcaactatgggcaggagtgacatgcattttgcggcattctggagaactagaatgtataaaatcggtcttgttcttgtttgttcttggatccttgtagttttatactgtgaacctagataaactgtgctagattgatccgtcagaggcaagtggcaggcccagcttctctgtttataatttcattaattgtccattaaaccaatgaatgccatgatctttggcttccccttgggccaagctgaaaggatggctgatttaaagaggaaggaagtactgaaggatattttggagagtcatatctttaccctcttgattgctagacaaaacgtcaagctgttgagaataaaagcatgacacagtgatcctctgatagttaaaagtgtcagattcaaatcagaattttcactttaaatactacatctcctgcctgaggtattttagattacgccagaaggagaggaatggactctttcatgcctagcatgggacattcacccaaaaggcaacctcttggcaaaaatgtagaagacttgaatagagagactttgagtcctcaaatgcttgttcctagtcaggatactttgagtaaagtatgtttacgtgaaagattaaaaaatgacttctcataatcctagcattttgggaggcaggggcgggaggatcacttgagcccaggagttcaagaccagcctgggcaacatagtgaaaccatgtctctacaaaaaaacacaaaaactagcatggcgtggtggtgtgcatctcttgtcccagctggctgaggtggggatcgcttgaacctgggaggttgaggctgaagtgagctgtgatggtgccactgcactccagcctgggcgacagagagagaagttgtctcaaaataaataagactccagtgtcatgattctggagtattatataaccatctgtgaatcagtttaggaggattctccctcatgaacagtttataaaaggaccagaaagacagaatttagcagagcagcattttaaagtaagtaattttgtcgcaggaataccgacatgttcagatctcaagctaacagttctttgcaacttttccaacctcctgcctggctgagaggttctagggctgttggcagcctgtgttggctgttgggagtgagtttgaaagtcctccaagaagactgggtcacccacagatgtttaccatgtgcctgctcagccactgactggccttggtcacacagctgcactctcatagctaatcttgggccaggaagccaggtccaggcagaatatagggcaaccagataatactcactactggaacatgccccactgaaatccccccaataatccagactgttacccacagccaagcacacaaacctgataaaaagcaaaacttggtggtatggcatgtattcatcctcattgaatttggaagtctgttgttactgatcctttttcccccaagccagagacttcaggagggcctttcaagtactgttaatgtagaaataggtttgtaagtaaatttaagaaaaatgaaaccaaagacctccctcctgtgatgctttccagcaaaatgaattacactgattcagaaggtaaaaggtttatagacactgtcatttgggcttaaaatccattggcatgacttatgagacagcttcaaaattactttttattaaaaactgtagcctctggttcattttatagattgctcttgaggaataccagcatcatacaagcatgaagaagactcacttcaggaccacatgatagttcttttccagaaccccttcagtttgttacctgggtcagctagcagcaatttagattaataaggaagattataatgcagtgggcaatggggagagccaggatacaaatactgactcagtccgttcaatttcaacagtgattgaagctgtggaactcacagatcgtatatgctgtatttgggggttcagatagcatctgcctctgtgtgaaaaacaatccttaatttgaataacttttcctttgtttacgctttccattccatgtgcagcacggagcacaaaaccaagtcacaaatttggattgtggatatctacttacatacctggaatgtgtgttactctacaaagactgggttcccactttatcatatgacaactctgggcacaataagagatattcccttaaggctggattaattctgtttggaaaactccattcctaaaacttacattctctcctaagatgctgtagagaggaggggtgcttgggggctgaaatggtgctggaaccatagaatgttcatgctcctaggaaccctacctagttcaggggtccctaacttctagtccatgaaggtccctaaagtcacatgcaaaatcttatctgtttttttcttgaagggaggaacaaatgcttttatttttattttctagtaaaactttttagcttcatcaaagtagtacatgcaaatagtttaaaggttgaaataatcctacaagactcattatgaaaaaaaaatcacacccctactgtccttaccttcttttctcactccccagagcattatttttggcgcttagctcatccttttggatgttaatccatacttctaaataacctgagtatattgctgctttttgactttgcaggtttacacctttgctctagacctcctgttatggaaaatgtccccttcccccaccatcctcttaatagaaatatactgacattttggttagagcagcatttactgtttacattattatgactacctaaatgctaatcacagttaactcatgtagtataatatcctgcatgacttttaattttccctagaattaattattatctttccccaccctaccccattagcttaattttcttttcttttttttcttttttttgttttgagacggagtctcgctctgtcacccgggctggagtgcaatggcgcaatcttggctcactgcaagctccgcctctcaggttcctgccattctccttcctcagtcatcagcttaattttctatgtatttatcattaattcttctgctgaccctgccagctgtctcaatctccttttaatacattgagacatatggaatgttctactgattccttttcttcagctctttcctggagcctctgacctgctcctgtctgaaccggttccctccatttctggacactgctgtcttcctatgatcttcttcgctaccattctgtgcattcccttcacttctcttttgagttgtggatgtcctgtgtcatgtatctcctgcctttcttcttcctggtttaaagcgtacagaggacgcaaatgtttttcacaccttgcatgtctgaaaatatcctcatttaacagaaacacctggtagacagtttggcaaggtacagaatgttagattatagacactttttccttcggacttttgaaagccctcctcattgtcttctagctctgaggattgctgttgagaagttcagagctgtgcagattcctgatcccttttgtatataacctgttttttctttctggaagaaattttacaatgatatctcttgagttaggtgtatgtttatacattatgctggtcactaattgggccctttcagtttagaaactcatatctttcagtactgagatttttaagaatgatttatttttttctcacccccttttttctgttttctctcattttagaaatcattttatttgaaagttgaacctcttgtcctttaattttcctttctttcctgttttccatgtgtctgctttctttattttctgggagattgtctcatctttatctttcagttttttactgagtttttaatactggcttcaaattttttaattccaataacttttttaattctaataacttttttcctgtgaatttcttttcttttaaaaaaagttctattcttgtttcatgggtgcagtatcatctgagaatattaatataggattatttaagaatgaggaaaaaaaaagaatgaggaaattctaagctgtgggtgggatgtattgattgtgaacttctttaagatgatctgactgggccattttattgatgaatccctgatacctcatcattggatctttcctctttagctcttcaggcttccataaaatatgtttttttgcctcctgcttgaaaggtataggactggctgttgaaagaccattataatgggcactgataaaaataaactgacatggcaacaaattatatttggcaaatagacaccggaaagcaaatatccagacttcccggccagggtataatcctggcgcttttcccgaatgcaaatagtgaagcgcatggcaaattctgcaggagacaaatttgttacaaagtaggactggaaccctactttcttgattcagagtttcactgttgctagatgaggcaaggccatctggctttatctccttttaggctgagcaaaagaagcccaggtgagccaaaatacgtattaatatatgtttgccgaatcccccccttttgaatgtggtactcttgccctcaaatgtgcctggtgttgatcatttctggaaccttcagtttcctcctcttaagagagtaaaattcccgtcttcttcctggattaggaagggcagatctcagcccagtggagcgagggaggaaatgtagagaactattctgcttctcatatagttcagccaacccctcttgcttatagccatatgttcaagggaggtttccagaggtgcctgatgccaccattccctgagttttttaagggttcggcgacataaattgcttgtttctcagtttttcccactgttggcttaggtttcggctctcttgagtctgccaagtcagttgctactcacccatttcctcaccagcttccaatatattttattgctgttatctttacttttgttatctttgttttcatgtgtttatgcctttaaaagtccatttactgtcattctggtaagatttgggaaaggaatgcaagtcaatgcctttaaatgcactatctctatgcaaagtcgtacccttgcttttttttttttttttttttttttaatcagtttcttaaagggagtccttggaaaattactagtctgcatcagcatttcctttttacgtagcgagaaaactgagcccagagaactgatgtgacaagctcaaagttacccaggcacagcggccaggactgaaggcttgctttcttgattcagagttcactcttttcttcctgttctgttattacaaattcaaaggtcacgtagccataatctttttatcctccttctgcttatcagataataaacattaattaacatgtgtttcggtttttctttttgcctctgtttagtgtcagctaaatttttttggtttgttcactcatgtattcgttctttcactcaacttattcaatggattttttaagctattgttaaatgccaacgctattctaggcactggtaaaatagccatgagcaacagaaagtccttgctgtcgtggagttcccatatattcagaggaagagaataaccaaacagactgattataagcagattggctcaggcagaaacccagctacaggcacacatgccaacctttaggaaagcaatgacctgatgaactgtgtcagaaaaatggagaactgacaagggaagtctcactggagaaagaagaagtgtttctaatctgaagaattaagttttctattaaccttttatggaaactgaggggagggtgagaagaagggggaagggtatgaatggccagatgctccgggaggtgctttgttttttgagagaaaaagacacaccaatagacaccaggaaagccgaaggcattcatcttaacctctgtgtttaatggttttataaaataatgatatgggcatttgagtgaaaagagagtggagcctgccttctttacagtcacattggggtttccgtctgttccagctgcatctgtctgatccctgggacttggtctcttgcctcctaccttatcacaccttagtctgtctgcttgctgtttctcttttcatcgggctacacttgggaacctggagaaacctcaggcctctgaacacattggcacctcccgagctacttctaatgaaaacctcttacctgacttgggtggacttttgggtatgcgcttgacttttgctttaagaacacatggtgtgttccatggagggttgttgaaaactgcctgatgagttgggacgggcacacctaattcaaaacttcagcattttattatgctctgtgaaacagtgttccttacacgcttagattttttttctgcttacacatcagagcagccttaaagttgaaaaagcttttattacgcatttcttgttttaagtacgctcaccctaataaccctgtgaagtagtgattatctctgtgttgactaaagggaaacacaactaatatacctactaaggtagcaagtctagccattgaacaaaccagagcttcaagtccagtttctgactcagggttgtagcgatagctgtggaggacagccttcctcctccacctgatttctctttccctcttgcttttcttcttcttcttagttattatcagattttgcatcctattcaggggccacaaaggcagggaagataccacagaaaaccaaagtccatatacaaacaggttggccacactgcaggaatatagaaagaaagtagtaggcaggacattgtgaaaaactttaattcttgatatagtcttttccccgtgacttctaacaacatctaactcacccctcctggagaattttgctgcaaaagaagagtcttttgtgtggaggctggggaggaatgaaatttgaaaatgataaaaagtgattgaagacttctctaaattaaaggtagtatcgttcactctgcttaaagagtgagcttgtgaattaattacagttaggagatcaagaaactgagacattaattgatagaaaatcgcatccaacacgtagatctagaagaaaatatctttattttctttctagcatcaaggaatattaaatctaaagtgtccccaggtatatggttttcaatcctgtgcttaaatatctcctgagaaggagattccataaattccctctataactaaccaatcctcataatcagcaagttcttttctatctgatctaaatccctagtcctgccatttaaactcatttcctcatgttctgccctccagggagataaagaacagctgtctgctcctatttgtaataatcctcatggagagtatttgcaatagtctcctttggcctaaataccaagcttgccctcacctttctttttaactcttctcttgtttccccacagagtcctcccatgctattcacatctttcttgaatagtttcttccccaggacctgccatggtgaaagacttagaaataagaatacagttgtaatatagacgccaaagaggtagcaggaagtcagatctgggcaactccatgccatgctaaagaaataaaacattctccattaagaaatgttttttgtttgtttgtttttgcttctttttttcttcttccccctggtagagacagggtctctctctgttgcccaggttggagtgcagaggctcttcacaggtgagatcatagctcactgcagtctctaactcctggcctcaggagatcctcccccttcagcctcctaagctggcactgtaagtgactgcacctggctttgtttttctatttcttgaggcatctctggcagtatctaggcccagccataggctaactgtgagatgggtggaattaatccttagtgtccttatcctcagtgtactctcctcctccagagtatgtcaggcaccaaattcctctctcccctactcactctccctcctctcaaatctctgttccctcaatgtggtttgatattttaggaggaaagcaggaagactgagtacatttcctctgctggccaagtctgatatttatttacaagcaaggcgccctccttgaatttcttagatgtgttaattgggcctagtctgcttagccacgaggtcctccctgcccatctcctttaggagcagccttgttatacttgtcacccaagggatgttttagagaaagttggtgctccacgaaatcagagaccactgcagtggagagcagacagccaaagacccatctcagaaaacccaggggtctctgttggcccattaagtagaagcatctgtacattcaactttcttcctcatggtgaatttttctgtagcatcacttccatttgacagtgaaaaaacttaatctgtcaaaaggtaagagttatttttaaaacatggttatattgagaaaccttgcatcttacatgtgaaaatagccacagaactggaaaggatggtctgaagaggggactttcaatatttcccagcagattctcagacagagactcaccttggcccattattggatcaaagtcaatataatattaggttaacttgacttatccagctggtgagatgcatcctgcagtcttgagtgcggaggcttctttgttttgtttggggttttgttttgaagtgttttgcattaccagaacaagagttcccaaaactcgggaagttgaaaggtctctttaatgggcacggatgaaaataaactgacatggcaacaaattatatttggcaaatagacatcggaaagcagatattcaggcttcctgggcagggcatagtcctggcacttttcctgaatgtgaataatcaagcacagggcagatcctggaggagcacacttgctccctattgcttgatgaagcaaggccttctcttttacctgctgttgggctgagcaaacaaagcccaggtgagccaaaaaagaaaaagatggagttggcctcctgcttttcagatgtatccttattaaaataggaaaaaatatttttaaaatgtggttcatgcatagccacattagtccttctgattgattatgtgaggatccagctgggtatggaccaacatgtggtttgtaagggagtcaaattcttaaagtatatctagagttgtttgggtctctggaggttgtttttgttttgacctcagaatagttaagagatttgattcccttctagaaataaagctcctactctggggaaagtgaatttttggcagaaagttattgccatggaggctaatttccccagccttaattatacacacacatgaagagtagagggcagtgctggggagggtccaaaacataggtttccaaaaaagtcaaaagcagtgtttcagccgggcgtggtggctcacgcctgtaatcccagcactatggaaggccaaggtgggccgatcacgaggtcaggagatcgataccatcctggctaacacagtgaaatcgtgtctctactaaaaatacaaaaaattagccaggcatggtggcacatgcctgtagtcccaggtactcgggaggctgagacaggagaattgcttgaacccggggggtggaggttgcagtgagccaagatcatgccactgcagtccatcctaggggacagagcgagactccgtctcacaaaaaaaaaaaaaaaaaaaaaaaggcagtgcttctccgcttctcaggaatattgaccccagtcccctatccatcccgccaatcccagaagaaaagataattagaggaagtacaacaagggccaaacttacaacaagcacataaatactttgaggttgatgcaaaagtgtgtatagctgtgtggttcatgaaaggggtgacaggaaaagctgtaaccagacccagggacatgagccagttctacattttgcagaactgcttttttcacagaggcttttgaggggccccagaaagagaatggaagtaatggggccaagttcctgcactggagggcagggcctttcctcgagtgttttgttttaatgaagcagctggaagggttgcttatctccggctgatagatgtgtatttcagcatgacaggaaagaggaggctcattcataaacaggcctggccctctggggtttcccacattgaaggaggggatgctgcttacaagaagtttatgaagtttatgctctgacttttcaaagtaaatgcagtgttttttattggagagccctgatcgcttttccctacctagagccattttttgagggttgcactgaggccggttttgccgaagagaagactaactctagggccttttgcactgttaaatgcaaaccatgtgtgtgacttgaggtttccttcctctccaaagcactgcacatttggcacgatgaatggctttagctaaaatgcagtggggtgtgtaatgaaaagtgggatgcttaaagtgttaggagatactcacactgcaccccacagggaacctcagtggggaagagaggccattcgctggcaactgcagtccccatgtgcaaacagctaaaccccttccccaaaaggtttttccaatagcagctatcccccaccccggtttctcaggtaatttatctgtttggcacacaaggctctctctactgtagctaggacaaagtctatatttcactcctgtttttaacaagtgcattcagaacaaggctcccaaacttccagggttctcttaactacaattgaaaggtcacaccctccaaatcctacagtgtctttatgagagaagatggacagtgtttcctgaatacaggtgctggtcagttgccagctcacacagaccaagtggtggtgatttcatcaaaggttgtggaccctgaaatccagggactttgtcatcaactctcaggggtcttagccactagagctgcctgtcagtcagctgtcttctttttcccattcatgatgctttaaaaataaaacaacaaatagcaaaaccttattttagaaggtattccagccatctaggacctagtctagttgcttctgccctggttgagaaaaatatcagttaaaatggcaaatgcggaataaatgatcttttcaggaatgcacatacataatatgcgtctttctctgactctgccttttctttattaactgcaggggagacagcaggaaggcagcaagtccccacctccccgccagcctcggaaaacagcagtgctgcccacagcatcggcagcacgcagagcacgccttgctccagcagcagcacggcctagcccaacccagcccaacccggcccaacccagcccagcccagctcagctcagctactgccaagggcaggaccaatggctgagcctcgtgtccagactcagagggctggattttggttcccttgtaaagacagagtgaatttcagtataaagatcacccgttgtattcaccccacacccagggctagtataaacatgaccctgggcttctgtaccacactagaattcatgtgagaaagctaaaatggtggtcttctccaccagcccctcacaggcttgggggttttcaatgtgaaacacatgccagtttttaaaatgctgctttgtccaggtgagaacatccataatttggggccctgagttttacccagactcaaggagttggtaaagggttaatagccagatagtagaaccagtgaggagatgcggccaaagattctttatatctgaaccaagatgtaaaacaagaaatgctttgaggctttctaagcgatcctcctgtctaatttgcacctttgtctggatgcacacttctgaccttgctgccacaacctgtggggtctgatgtgtcccttgatgggtgctgccctcagggactgcaccctgacaagtgttaaggcaacattcctttcttgtgccctgggccaaaaccaatgctgatgaccttatcagcttcctgtttcttcccatacttgcatacaccactgcaaaatgtcttaatgcaaattttgtatttcttacaggcctacagaaattgaaaatgaccaaaatcaggaaccacagatttgtgcccattcctaatattttgttctgcaaattaatgtataatttgaggtgaaattcagttataaagtcaaggacgaatttgcacagtgatatatttctatgtgtatgcaagtacaagtatataatatgtcacctggcacattcattttctcagttgaagaagagaaaatttgaaaatgtccttatgcttttagagttgcaacttaagtatatttggtagggtgagtgtttccactcaaaatatgtcaacttaaaaaaaaataggccctttcataaaaaccaaactgtagcaagatgcaaatgcatggcaaatcctgtcggtctccagttggttatctgaatagtgtcaccaattccaccaagacagtgctgagattggaaaagggcactcatttggattgccttacttctcttgccttaaatatatcccatatatttaatatgtcaaaaagggcttgaggtgaatttcattaaatggaataatatgatgccactttgcagctaaaataagctcagtgatacctcct

SEQ ID NO: 2 - DNA, 12628 bp, Homo sapiens
gcctcacagaattgagagtttgttcttacacacaagtttaatgccaccttcctctgtctgccatggaccaacaagcaatatatgctgagttaaacttacccacagactcaggcccagaaagttcttcaccttcatctcttcctcggggtaagtggctttaattttcctttcggcatttgtatgtcttccagaattagatcttcctgttacatttatggctttaaatcattgctttaaagatgagcagtagttttatattaatgtttaacgggtgttgcatggcttgcctgtagataatcacaactttgggaaaaaaaatttaaacctcatacatttatttttttcaatcaagttagcatgaaaagcaaacatcacttgtcttactgagccttggttaaaagactctgaacactttaggctaccctgggcacactgcctattggttacccctgctctacagggatggaaagaaggaagaaagaaagaaagaaagaaaagaaagaaagaaagaaagaaagaaagaaagaaagaaagaaagaaagaaaggaagaaagaaagaaagaaaggaaagaaagagaaagaaaagaagaaagaaagaaaggagagaaagaaaaagaaagagagagaaaggaaaggaaagaaagaaaaagagaaggaggaaggaaggaaggatggaaggaaggaaggaaaaatattttacatgtatgaactaaggaatatttaagacacattgcaaacttgctgtaataacaacctacgttattccaaattcctctacaaaatatcaatactatgattaagtcccagtgcattttcatccataatattcctttcagaatacaacgtgtaggccagttgcagtggctcatgcctgtaatcccaacactttggtaggctaaggtgatttgcttgagtccaggagtttaaggccagcctgggcaatgtggcaaaacctcatctctacaaacaatacaaaaaaatagccaagtgtggggcacgtgcctgtggtcctagctactcgggaggctgaggtgagaggattgcttgagcccaagagatcaaggctgcagtgagctgtaattgtgccactgtactccagcctgggtgacacagcaagactatctcaaaaaaaaaaaaaaaatatatatatatatatatatatatatactttttatacatatattttatatattttatatatatatatatactttttatacatatattttatatattttatatatatatatataaagtgtaggcttaatgagtaacatacttcactctctcaagagaggggaacactttctggaaaaaaaatcatattcaagatcaaagatttgaatatcattactacctgatagtttctagtttgaaaagtatcacagcttagaaagagacaagccacaaaaatactcgagcatatcagtaacgaacctacttaccatttgttgaaactggcactttcctgtgtctctgaagagttagcattctgagtgaaagaagcggggaacaccaatgtgaggtaacacatgatggatagcatggcctgtggatggatgggaagaaactagaaactgaggcagaaaatcagcatgaaattattatgacacattattattttctgatatctaactgaatttactatcattgataatattacaattgtttaccaatctgatattcattccatgtcatgccaagcatttgacttgtgctgttttaagactgtttaagttttaaactattgaattctcaaagttttaagtcaagaagaaagtcttagagccgtcaattaagtttcagtataattttcacataagagtagaggaaatcagagggttctaataactatagggaggatttggttgagtaacatttttttttaaagaaaagagtaagtctttcttttcctctattcatatctagcaaaaggtggaaagtgggcttttgtcagaaaatgaatatagaggtagtgagactcttcccaaatgttgctatgatcccaaaccaatggatgcagaaattttttctacttggattgtaataattatcctataaaatgtcattctgagagtaaacctgaagaaaaaataagagtagaataaagccagagcaaaatatgtgactatagaacactggtctgatattgaatgacagtaaaaccactattggtctctggctaaactgctgaggctgtggtcactctgtagcaagcacggtgattgtgtctaaggcagtcaacaaaaccagaaggagagatgtgagtgataaccgatcttgcttatggccaaatggccaagggtttggtctgttagaaaagtggataaggtgtttgcaaaaatgcccctagagtttattcattcattaaaaaataagctcctactctgcaccaggcatgctgtgaatacagcagtgaacaaaatagagaaaattattttccttcatagagtttatagtaaaatagaggcacacttgtggaagacagtatggcgattccttaaggatctagagctagaaataccatttgacccagtgatcccactactgggtatatactcaaaggataataaatcatgctgctataaagacacatgcacacgtatgtttattgcggcagcattcacaatagcaaagacttggaaccaacccaaatgtccatcattgatagactggattgagaaaatgtggcacatatacaccatggaatactgtgcagccataaaaaaggatgatttcatgtcctttgtagggacatggatgaggctggaaaccatcattctgagcaaactatcacaaggacagaaagccaaacaccgcatattctcactcatagtgggaattgaacaatgagaacacatggacacagggcagggaacatcacacaccagggcctgttgtggggtgggggtagggagaagggatagcactaggagaaatacctaatgtaaatgacgagttaacgggtgcaacaaaccaacatggcacatgtatacatatgtaacaaacctgcacattgtgcccatgtaccctagaacttaaagtataataaaaaataaaaattaaaaaaatggaggcacaccatcaataaaataaacaaataactaagtcagtataaaagatgagacggtgttaatgttattgagaaagatttgaatataggatttaactttcggggagggtagcatatcaaacagaataatcaaggaaggcctccctgagaagatgacattgagtcaaaacctgacagaagtgagggacaaagacataagcccctgagagagaagccttctaggaaggtgaccaacaagtgcaaacacatcgaaatgaaaacacgcctgtggtattgtaggaggcatctgcgtggagagtgagcgtatggaggccagatggggtgagggcaaaatgtgaaaccactattggactctggctaaactgttgaggctatggtcactctgtagcatggtgattgtgtctaaggcagtcaacaaaaccagagagatgtgagtgataacatccaacagaagtgggcgccagcttaaatagggacatatgagccattctacagactcagatttgcctgatgaaaagccattggaaggtttagaataatgaaatgagatgatttcacatactttttaaactcaaatggagaacagccataggtaggtatttccagatagctaacgtccgccggacccctgtagtgattcattgtaacttcattaattctaatgtcacgtggtgccacagaaacacagtacaggagtacattcctcccagacacagtacactccactcaactccttacattttagcatgaatgaataacgatttttaaaagtcaccaagttgccttttacctatagttaaaaaaaaaaaacaacttttagaaaaaaagaactgctgttcattgaacagttaccatgtgccagacactgtgcccagcatttagaagaattgtttcatataatcctctccaaaatattatgacatagataatattccacatttcacagatgaggaaatctgtgggttatgaaggttgaacgtattttccaaaataacatgttcacattcagatttgctagatcggaaagactgttcttaatcaatgttagcctttagtaatgaaaattactaaattcatgttagtaatagaattaggctgggtgcggtggctcacgtatgtaatcccagcactttgggaggctgaggcgggtggatcacctgaggttgggagttcgagaccagcctgaccaacatggagaaacccgtctctactaaaaaaaaaaaaaaaaaatacaaaattagccgggcatggtggcgcatgcctgtaatcccagctactcgggaggttgaggcaagagaattgcttgaacctgggaggcggaggttgcggtgagctgagattgcaccatgagcctgggcaacaagagtgaaactccgtctcaaaaataaataaataaataaatagaattaagttaacacttaaaatagtgactatacagagctttctccactagacaaacaaacttagagtttcaaggaagaaaacggtggggaagagaagagacagaaaggtgaaataacgtacatatataaaactggaaggaaagccatgccagtgctgtcttgggcttattgactgcatgtagacattcttgtatcacaccagctctcattagaagttctaggccaatattaccaagcttggtttcctcacattcagatatatccctggggccttggagtctcctctaggtatctactcctccctgcccccctccactgatacagcatgtcctaaatagtaccagacgataatccatatgttacaaccctgaccccagtgtattatggttcctcccataatctttgatcacatctaacgctactaaattctatctcctcagggccgttttagagagagctgattcacttatatcagtgtgagcatcctaatgtgagagattatcaggtctgcaaactggactgcacaacttaatcctcaaggatactgtaccattaaaagtagaaatggcttcatggccgttctgaaacatataaagagactaaaggataatattatagtatatctgatgctaaattttttaacatgtaactcatagcaagtaatcacttacatggaataatattagaaaaaataaaaaggaatagacaatacaaataaatcaatagcttcagataaattagaaagcctttattcataaaagctcctagctctaataatagaatttataaagtaatttataattataatatatctaatatgttaaaaaccaaatgagagcagagggagacttacaattaaatcagagataggggagctatttaggcacaacttctagcagtgtaactgagcaatatactaccagaataattccttatcagagttgatttaattttggaagctatatcccagtgtttctccaaaatatttttataaatctctctttattttttttctattaattcatgttttcaaagatacagagcaaaatacattgataaagttgcgattaatttataacatttcatcaatataatcataacttttgaagaacatgggagattcattatatagtaattgatgtgattacagagaaaagcagagatatctgacacttggtttagactatgcgatgttgtagacataagcgcatgttatgttatactagtgataatattgaaaaaggtatgcagtcacaaaaccttatcccttgatggcttgggatcccaagttggcttagacccaacttggagatgattgttctagacaacagcaaagcagaggattccatgtccaagaatagaatttctgtataccaccagcacctaacatggtacttggcacaaaatagagagagcctcaaaaaatatcttgactaaatgaaggtcttccttcttggacaaaatgctttgacttacttcatacattaagacatgcacttaatttttgtatagcacttggcaattttcaaaacatctttctatctatctcatttggttcttacaccaatcctttgtatacacacatgcataagcgttcatattttatcaatgagcaaactctgttggatctgagaacccatcttgcaggactctacttttagaatgatggatagaggttgttccctgcccccatcccccaagctgaatctaattgtccctatgttatcccaagtacatttttgtgccagatgtactccactgagttaaccaaggttttttgtttcgtttgtttgtttgtttttgtgtttttctttttaacttttcagatgtctgtcagggttcaccttggcatcaatttgccctgaaacttagctgtgctgggattattctccttgtcttggttgttactgggttgagtgtttcaggtaagtggggcaccatcatctgtttcataatacttactctacttccattacgtatcttagagcatctctgtaggggtgggttgcccctacacacctgtgggtgtttctcgtaaggtgggacgagagatttggaaaagaaaaagacacagagacaaagtatagagaaagaaataaggggacccggggaaccagcgttcagcatatggaggatcccgccagcctctgagttcccttagtatttattgatcatttgtgggtgtttctcgagagggggatgtgtcagggtcacaagacaattgtggggagagggtcagcagacaaacacgtgaacaaaggtctttgcatcatagacaatgtaaaggattaagtgctgtgcttttagatatgcatacacataaacatctcaatgctttacaaagcagtattgctgcccgcaggtcctacctccagccctaaggcagtttttccctatctcagtagatggagcatacaatcgggttttataccgagacattccattgcccagggacaggcaggagacagatgccttcctcttgtctcaactgaaagaggcattccttcctcttttactaatcctcctcagcacagaacctttacgggtgtcgggctgggggacggtcaggtctttcccttcccacgaggccatatttcagactatcacatggggagaaaccttggacaatacctggctttcctaggcagaggtccctgcggccttccgcagtttttgtgtccctgggtacttcagattagggagtggtgatgactcttaaggagcatgctgccttcaagcatctgtttaacaaagcacatcttgcaccgcccttaatccattcaactcttgagttgacacagcacatgtttcagagagcaaggggttgggggtaaggttatagattaacagaatctcaaggcagaagaatttttcttagtacataacaaaaaggagtctcctatgtctacttctttctacacagacacagtaacaatctgatctctcttgcttttccccacaatctcaacataatttggctaccccaatcttagtgtaaaatcaatgaataaaaagtcatgaaacaatgtttctaacagtcagtccatatccactttggataccagcctttcatatttgtcttcctaactgccctgagagtcatcacggggtattatatatgtggcccaagaacttttgaaaaaaatcacaattgatgataacaaagaaaagaaaaatttccagttatttatggtttataatgtacttactaaaattccagattgcagtagacaatctctcccttggaacaggcacaattagactcattttgaagatgataaagttcaggtgagactgtaggcaatttaagagcttaagtaatccccttagattgacttacctagtagatacaggcaacctaatggctgtgtgagtccacctgttttgttttttcttatttgtttctgtatgcttcctgtaggtgagatcttttttttttttttttaccacttcgctaatacttttattttctgtccatattcaagcgtgttgagattatctagtttcctaaagtaacaaatataatatatccactccaccacacatttcagcatttaatactcttgtttttccttatgtactagtgacatccttaatacagaaatcatcaatagaaaaatgcagtgtggacattcaacagagcaggaataaaacaacaggtaattgtgtggcttcaatttcctaagaataactgttaatatttggtagatttcatgtgttaccttaggcacaattcataacaatccatatgttaagatattcttatcattctgcttttctggattagaaaattgagacataaaaagattcaacaacttgctgagggtcacataagcaccaagtgatgaggctgggaattatatgtaagtggtctgacttatgagcctaaggttttaaccagcaaggcatgctgcctcatgaggagcctctgctaggatactccactgttgataggaaatatgtgaaatatctgattattttagtgagctgttaagtttggtctgaagttaattgatagaacttaaacatagaatgaattctttactatttattatatttcctcaccatgcagccacattagtcttgttccagtgtgtgttaataaaaaaaggtgactactgttgagtgactatagtggaatatgatctgtgtgcacattctcacagaatggaagttttaagaaaacctgaaagtccttctggaaaattctatccaatagatcacattaagtaggtaaatacatcgtttagcaattggaaattttcttataattttttctccatggtatttcttattaatttagtgaaaataattatttgctatgcattttgtgcatcatttaaagtcagtactttttacatgagttttatattgttgcctgtgcagtgaaacaggcactggtgatgaatttaaggaaactgagaagtagtgggaaatatttcatctgactggctggacttaagttattctgtctctcactgtcttaaaatgtaagatgtggcagtttaaattattctgatggtgttttcctattttaatattttatgattccatttatgctcaagataactggtcactaattcccaattcttggtactagaatgaacagtaggtctcaaaaatctcaactttataacaaattcattgttctcacagtgataatcaaaaactttgagcatttataatgacctgtgtgtgtgtgattggttgtggtgtgtcagggataggttagaaatataacatttatttcttatttctgttttttactttagagagaccgggtctcttaaactgcccaatatattggcagcaactccgagagaaatgcttgttattttctcacactgtcaacccttggaataacagtctagctgattgttccaccaaagaatccagcctgctgcttattcgagataaggatgaattggtaaatcattaaataaaataccttaataaaacttaacactttctttaaaccatattaatgtctgtgcattagcccaggggttttatgcaatggaagtgatgactttgacttcacaatttgaatgactacatggatatgtaaacaaataattaaatataaggtgatgaatacaataatagaaataaaaacatagacagaaatatcacaaagaaggaataattaatgctgacgacgagttaggaaagacttcagagatgaggtgatgcttgaactaggttttaggggatcaaaccaggaatagataagcagattcaatatttttctgttccatttatagatacacacacagaacctgatacgtgacaaagcaattctgttttggattggattaaatttttcattatcagaaaagaactggaagtggataaacggctcttttttaaattctaatgagtgagtattagatgagctaactttaatattcaatttatatcaggtttacactgcaaggtagtaacactgaagattgagttttgtagttttaatttggtttaaaaactcaagaagttctgaataggctaagaacatggatgatttcaaagttggttggaaagttctatatatgaaaagatatcagctctttatgagaaaatatatttttatctgcaatggagttttaggggacaggaaatagactaacttatttgaaacgggcacattaaattaaaaatagtgattatctggagaccactggcacacagaatgtcttacgttgtatttttcaaactgtgggaaaatatacattagtaggtaaagagaccaatttagtgggtcacagctggcattaaaagaaaagaaaaaatagtaaatatcagagtgtggaacccagacacccacgttgtgacaaaaattgcagtatatttgaaccactggtgtgaaagacagaggtacttgagacgatgtgatgaaaacatgtctaacccacaaaagagctatttgctgttttctcttcagtgtgacatgcttttgtcttgtgtaagatggtcaaaattaccatcaacgtactatgaggcatttgcgacacaggcaaatttcatgttttagcagaattcatggataattttgcagaaaaaggcagggtgttttcttccctcacaagcgaaaatgtataggccttcaaccacatttctgtaaagaacttttaatgagtttttcaaaagagataatataaacagttatatttaatgagtctgtaaatgatttagtcaaattggcagaatttacatttaaaatgtattttccgtcactcaaaaaacaagaggttaaaatctaaaacataggagaatgttttaagtttgtctacattatcctaagataatttattaagtatggaaagtattaaacactgaaagaaatgttggctcaatcagcaaagttttgacattatatgagccacattctaaaatattttataaagtgtaagattttaaaataaagatgatttaaaataagtgttctggactagaataaatttatgaaaagccaaacatacacattatgtttaaaaacatctctcttgatttttatattgctttctgggggttattttcaatattttatttacaaataaatgaaagtaggtttgctattaatttatttttatctttccacacatggtattggtgaattagcatttattaagtatagtttgtgtgtgtgtttcttaatggggtcataatgcaaaatgtttattttattgtggttcacagtaaaaaataaaatttgaaaacattgaaatgtgaacataaatatgtgtaaagtggatggaggaaattcagttgaacttttcattttattctgaggagaaagatgatgctttaagataatagtgatcaggtaaacctggaaggtatcacgttatagtagaaaaagcaccagttagactctgcttttatttgcaaggcaaggaaagaaagggaagaatcataatttttttacaggattattttgggggctacaggagacaatgttcaagagctagccagatgtctcatcaaggaaggcctgtaaaaccactgagggccttttggaaaaggaattgttgacttggccagattggcatttaaaaaaattaccctgataattgaagaaacaattaaaagggtggaagagataaaatatagggaacttttgcaatagcccagttgaaagaagttcttggtttgactagaaggttgggcagtaggaagaaatcagacaagcagccccaagaggctacatgagaaaatggaacaaaggactaaagaaaagctgtgatggagcccagcatgctgccaccacctcatccgtttgagacaaataggagagtcttgaactcacaccgtccttgcaactcaaccccaatacagcctgtccctttgtttgaattatatcatcacctcctacctgcagtgagccacaggactcatgtctgtttgaaactaatattatgtttctgcagacacctgttcacctctgtttggaatgagaatgaaaggaacctctgactacataaccatgaactgagccactttttctcactgcttccaaattctatagaccctgaatatccatcatgcctctagatatttatcatatttactcagcacatatttttgaagtattgccacattttcatatttcatctccatgcctcccctaaatattaggtggctatagcctaaatatttaataaaactgtggctcagtaaagttaggaaacatttttaatgtgacctgttagtagaacaataagaagactgaatccccagtttccaaagtttctttctttttttaatgtaattgtgaagtttcttgttagagggattcttttccaatgaagatgaacttggaagttccagaggtttacattagctctatcttaaaagttcataccattatatttgtgaccgtgtgccttctttgtttaatagtttatcattctactgcttcctgagagtcctaggaaataatggctaagtgagaatagctctgagaaaatcataaatgctaagacagacttttcttttgctccacagcttagaaattagaggtgatgctaaagaaaacagctgtatttccatctcacagacatctgtgtattctgagtactgtagtacagaaatcagatggatctgccaaaaagaactaacacctgtgagaaataaagtgtatcctgactcttga

SEQ ID NO: 3 - DNA, 38712 bp, Homo sapiens
tttctccgcatgcgcgggatcccggatgtggatcaagttggtgggaagcgtgcggtgccgcagcaatggcggcgctcacaattgccacgggtactggcaattggttttcggctttggcgctcggggtgactcttctcaaatgccttctcatccccacatagtaagggactcgcacggccaggggctgggcggggaggccccgcggtcggtcagggcgggagagaaaggtgtggatatccctgggtatgaagagaaaactttaggtcgtgtttgtcgctatcctgcctttgctaagctttctgtttcgccagttgttacttgacttagccccagctggctaggttcagacctggcgctgtctgatttggaacaaatcactttaacgtttctgaacctcagggtcctcatccttaataggcagttaagaacctctgcctccaacagccattcagccagtattatcagatgcctgaggtgccaggtaccgttctaactcccgggagatgcggtggtgagcaagacattgctggtccttgccctcgaagttggtgggtggagctagacaaacaggaacttttcagattgtgataaaggaaatagagggttactaagtggctgtgcgctattcctttagaaggtgatgtttgagttgaaattcaaaaaatgaaaaagaataagtgatgtggaaagcagttcaggcataggaaagagtaagttcaaaggccctgtggcaggaaagaagtcagagcattctaggaacagaaagtgccccttgtggctgcagagcattgagggagaggagtggcacagcatggggtgcactggggacagataacacagggtttcgaagaccacagttagactgctgtgtaaaaaatggatgtagggccaagactgaaagcgtggaaaccaagaagcaaccatgaaatggtggtgtgtatacagtaggtactcagtatttattaatattggcttccgccttcccttcatccttcctcttttttctttttctccctcatcccttttctcctttccctcccacttcctagtttagggtttgttttattggtatcctttgattcaggctcttggtgatctcttgttgaatatgggagagtcatatgtatagaatgtaagtccatactgatgcgtatatgtaatcatgtaagtggaatgtatatgtagattcagtaaaatgattaactgtaggtctgtgcataagattatttcttgctttagttgcctcaggctagaaatgtatcctcagagttgttttttttgtttgttattttttttttttttgagacagtctcgtcccactctgtcacccaggctggagtacagtggcacgatctcagcttactgcaacctctgcctcccgggttcaaacgattctcctgcctcagcctccggagtagctgggattacaggcttgcaccaccgcgccaggctaatttttgtatttttagtagagatggggtttcaccatgatggcggagggctgatctcaaatctcctgacctcaagtgatccacctgcctcggcctcccataatgttgggattacaggcatgagccaccgtgcctggccagagttgttattttgaatactgctcttggtccaggttaagaatgtatatagcgctcactttggcagcacatgtacaggaatacctcattttttgtactttgctttattgcacttcacagatactgcattttcattttttttacaaattgaaggctgcggtaactctccattgagcaactctatcaatgccatttttctaacatcatgtgctcattttgtgtctgtgttacattttggtaaatcttgaaatatttcacactttttcattgctattatatttgttatgatctgtaatcagtgatctttgatactactattctgattgctttggggcaacactatggtgaacttaataaatgctgtgtgttctgactgctctatcaaccagctgttccatcatctctctccctctcctcaggccttgctgttgactgagatacaataataaagttaggccaattaatagccctacagtggcatctaagtgttcaagtgagaggaagagtcacatatctctgactttaaatcaaaagctagaaatgattgagcttgatgaggaaggcatcctgaaagccaagacgggctgaaagctaggcccattgtgccaaacagccaagttgtgagtgcagaggaaaagttcttgaaggaaactaaaagtgctactccagtgaatacacaagtgataagaaagtgaaacaaccttgatgatatggagaatgttttagtggtctggatagatcaaaccagccataacattcccttaagccaaaaccttatccagagcaaggccctaagtcttcaattctttgaagcctaagagaggtgaggaagttgcagaagaaaatttggaagctagcagaggttcttttaagaaaagaagccatcggccggacgcggtggctcatgcctgtgatcccagcacttcggtaggccaagacgggcggatcacctgaggaccaacatggagaaatctcgtctctactaaaaatacaaaattagctgggcgtggtggagcatgcctgtgatcccaggtacttgggaggctgaggcaggagaatcacttgaacccgggaggtggaggttgcagtgagctgagatcgcgctattgcactccagcctgggcaacaagagtgaaactctgtctcaaaaaaaaaaaaaggaagaaaagaagccatctccataataaagtacaaggtgaagcagcaagtgctgatgtagaagctgcagtaagttttctagaagatctagctaagctcactgatgaaggtggctacactaaacaataggttttcaaggtagaagaaacagacttacattggaagatgccatctatgacatctagttgagccatttctcacttactattctaaaaatccaatggcccttaagacttatgctaaatctactctgcctgtgatctataaatggaacaacaaagccctggatgacagcacatctatttacagcatggtttactgaataagcccactgttgagacctactgctcagaaacattttttttttctagaggcagggtctcgctctatctcccagggtgaagtacagcggcaccatcatggctcactgcagccttaatctcctgcgcttgagcagccttcctccctcagcctcccgaatagctgggacaaagacagatgccaccatgcccagctaattttttttcctttctctctctattatctgtctgtctatctatctatatgtgtgtgttttgttttggtttgttttttttttttctttttggtagagacgaggtgtcactgtgttgcccaggctgatctcgaactcctgggctcaagtgagcccttccaaagtgctgggattacaggcctgagccacctcactggtcaatatttttcctttttcttttcttttttgagacagtgtttcactttgtcaggctggagtgcactggtatgatctcagctcactgctgcctctacttcctgggctcaaacaatcctcccatctcagctccccaagtagcttgaactacaggtgcacaccactacacccagctaactttttgtattttttgcagagatggggtttcaccatgttgcccaggctcgtctcaaattcctgacctcaagcgatccacctgtcttggcctcccaaagtgctaggattacagacatgagccactgcacccacccattatttttcttttttttttttcttatttatttatgtttgagacggagtttcactctgtctcccatgctggagtgtagtggcacaatctcagctcactgcaacctcagcttcccgggttcgagtgattctcctgcttcagccacccaagtagctgggattacaggtgcacaccatcatgccctgctaatttttatatttttagtagagatggggttttgccacattggccaggctggtcttgaactcctggcctcaagtgatctgctctctttggcctcccaaagtgttgggattacaggcgtgagcaccatgcccggctttttttttaaatgtatttttggagagatggggtcactgtgttgctcaggccggcctggaattcctaggctcaagcaatcctcctacctttgcctcccaaagttctgggattacagacatgagcccctgtgcccaaccttaatgttgttttcatgcctgctgatgtaacatctattctgcagccagttgagtagttgatttttttttttttttgaaacagggtctcactctgcctctcaggctgtagtgcagtagcatgatctcatctcactgcaacctccacctttcaggctcaagcaatcctcctacctcaacctgccaagtagctgggacttaaggtgtgtgctaccataccctgctaattttttgtatttttagtagagatgggtttttgctgtgttgcccaggctgtttttgaactcctgtgctcaagcaatctgcctgccttggcctcccaaagtgctaggattataggcgtgagccaccatgcccaatcagttttgacttttaagtcttgttatttaagaaatacatttcataaggctatatctgccatagatagtgattcttctgatggatctgggcaaagtaaattgaaaccattctagatgctattaagaacattcatgattcatgggaggaggtcaagatatcaacattaacaagagtttggaagaattagattccaactccaatggataactttgaggggttcaagacttcattggaaaaagtaactgcagatgtcatgggaatagcaagagaactagaagtggagcctgagcatgtgattgaattgctgcatgatatctcatgatacaacttgagtggatgaggagttacttctcatggatgagcagagaaagtggtttcttttgagatgcactctgctaatgaagatgctgtgaatattgttgaaatgacaacaaaggatttagaatattatataaacttagttaataatcagtggcagggtttgagaagaaggattgactctagttttgaaagttttactgtgggtaaaatcctatcaaacagcattgcatactagaggaatcttttgtgaaaggaagagcccatcaatgtggcaagcttcattgttgttttattttaagcaattgccacagtcttgccaggcgcagtggctcatgcctgtaatcccagcgttttgggaggctgaggcgggcgggtcacctgaggtcaggagttcaagacccgcctggccaacatggggaaaccccgtctctactaaatatacaaaaattagccaagtgtggtggtgggcacctgtgatcccagccacttaggaggctgaggcaggagaatcacttgaacccaggaggcgaaggttgtagtgagccaagatcacaccattgcactccagcctgggtgacaagagtgagactccatctcaaaaaaaaaaaaaaaccagtttgccacaagtcaccccaatcttcagcacccataaacctgatcaatcaacagccatcaacattgaagcaaaatcctccaccagcaaaaagattaggacttgccgaaggtgcagatgatcattagctttgttttagcgataaagtattttaaaatgaaggtgtacgctgtctttttagacatagtagtattgcacgttttatagtatagtgtaaacataacttttttttttttttgagacggagtctcgctctgtcgcccaggctggagggcagtggcgctatctcggctcactgcaagctcaccttccgggttcacaccattcttctgcctcagcctaccgagtagctgaccctacaggcgcccctcaccaagcccggctaattttttttgtatttttagtagagatggggtttcaccatgttagccagggtggtctcgatctcctgacctcgtgatccgcccgcctcggcctccaaagtgctgggattacaggcgtgagccaccgcggccggccagtgtaaacataacttttacatgctctgggaaatcaaaaaattcatgtgactcactttattgcgatattcacttcattatggtggtctaaacccacaatatctctaaggtatgcctgcactaaaatcgaatgatacaggaagcttagcatggtccacgcacaaggatagcatgcaaatttatgaaacacttcatatatttaaaaacgaatgtttttaattgtagttaatgctctgtttctcaaaccagaaacccctgggatatgagagggaagttacaggataaatgcagatatattcaacaaaacatttactaattgctttattatgtaccaggtactgttgctaggctagaagggaggaaaaaatagatatgatccctagccctgtgaagtgtgtagttcagtaagtataacagtacaagaaacaaatcaatgcaaatatatagttacataactacaatttggattaagtattaggaagaagaggctgggtgtggtggctcacgcctgtaatcccagcactttgggaggccgaggcgggcggatcacgaggtcaggagatcgagaccatcctggttaacacgatgaaaccccgtctctactgaaaatacaaaaattagccgggtgtggtggtgggcgcgtgtagtcccagctactggggaggctgaggcaggagaatggcatgaacccggaaggcggagcttgcagtgagccgagatagcgccactgcactccaacctggtcgacagagtgagactccatctaaaaaaaaaaaaaaaaaaaaaatggaagaagaagaacaggatcctatcaggcgaccaagaaggaagatgtactttcagttaggtgtcagagaatgtctctgaggaactgacatcattggaggcctaaagtgtgaatgagagggccatccatgcagagtatgtggtgtgtgcaagtgtgtagaacttatctgaaagagcacactgtataaatataggccctgtggtgtgaaagtattgacctatttgggcagctatgataaggccagtgtagctggcatggaataagcaacagagacagaaacatgcacagtgaaattggaaagataggcaccaaatcatgccggagcttataaagccaggatgaaaaatttagattttgattttataagctcagtggaaatgatctgcatttataaaatattttttggctcccatataaatgattggaggaggcagaaggagagtcaggaaggctaggtgccctttgagaaagtctacatgagagaagatgctgacttgaattggagtggtggcattagagatagaaatggacaaattaaagatttattttgccttgaggtcaggaaggatttgcagagaaaataacaactaactttggaagtatttggtggtttaagagccgtagctagggagtcagactgccctggttagaatctggctctgctgcatactggctacatgacagggcaagctgcttctctacgccactggtgaaatggtaagagttaaagaacctacctcacacagagtgttgcaggcagagggaaaaggtgaatgtagagtaagacaaagacaggtgggaggatggtgagaaatgggctgaaaaggtgagtaagcgagatccaaaaatatcttttagactatgttgagtactttagattttatccagagggcagaggccagttaaaagggaaatataacattcgtgatttagaaatactactttggctgcaatgtgaaagctagattaatgaagggcctgagtgaagatggggagttcaatttaagaagctatcataggacaagtaagagatggtaggtttttgtttgttttaatttttagagacagggctgggtgcagtggctcacacctgtaatcccagcactttggaaggccaaggcaggcagattgcttgagcttgggagtttgggaccagcctgggcaacataatgaaaccccgtctctacaaaaaatacaaagaattagctggagatggtggtcaaaaattttagagacagagtctaactctgttgctcaggctagattacagtggcacagtcatagctcactgcagcctcaaattcctgggctcaagccgtcctctggcctcagcctcctgagtagctgggactacaggtgcacaccaccacaccagctaatttttaagttttttgtagagatgggagtctcattatgttgcccaggctggtcttgaacttccaacctcaagctatcctcccaccatggcctcccaaagtactgggattataggcatgaaccattgtgctcggctgattgtagattttgttaatgcaatttaaaaaagtagttactatttatcattatgtctctagtcttagttttgctttttttttcaagtgtcatttcagcaattaagattacttttactgatgggtgcagtggctcacgcctgtaatcccagcactccaacaaaagtgaagtctccaacagttttgaataggaaacaacaaaataaagcacccaaaaaagagactggaaaaagtctatatagtacaactatataggaaaagaaagtgtccccaaactcactcagattttgtaaatgctgtctccaaagagagtaaaaaagacatgtctataaaacaagaacagatgctatgaaacaggaattatcagagaaacagtggttaatagaaaatgttattgccaaaattaaggacaaattgagtaaatctttcaaaaatataagagaaaagataaaaattataagttcaatctagggtgtctagcatccatctaaaaaaatttcagaaaaaaaacacaggggaggagattaacaaataataaatttcccagagctgaaggcactacatactcagcataattaatgaaaaaagaccctcatgaagacattaatcactagacatttcagactgctatggataaaaaggagaaacaggaaacttccagagatgaagggaaaaccataaagtaaagagacttaccaacatcaacattttatactaaaaaccaatggaataagcttccaaagttcagtggaagtaaatttcaacctagaattccatacaaaatccagtataaaataccagaagtgcaaatcataaatgtacagctcactgaatttttgcaaagtgaatacatctgtaaaaagcatatagatcaataagcagaatattatccctcgggcatctttccagccactccccacaaccccaccccactaaaggtattgatattctcacctttttttttttttttttttgagaccgggtcttgctctgtctcccatgctggagtgcagtggtgcaaacttggctcactgtagcctcagcctcttgggctcaggcagtcctcccacctcaacctcttgagtagctgggactacaggggcgtgccgccatgcctggctaatttttaaattttttgagagatggggtctcattgttacccaggctggtcttgaactcctgagctcaagtgatccacccgccttggcctcccgaagtgttgggattacaggcgtgagccatcatgcctggcctctgatgttcttttaaccgcataggttaaattttgcctgtttttgaatttttgtttgggttttttttgtttgtttttgaattttatacaaatgtaatcatacaatctattctcttgggtctggctttcactcaacattaagtttgtgcgttgttgtgtaattactgttttttcattcttatcactagatagcatggttctcaaactttttagtcagaatcacttcttaaaaataattgagggtcacaaagagctatatgtttatgtgggctgtataatagataattaccattttagaaattaaaacaaattgttcaagcacaagaatatacaagcacaaatttcactggccttcagagtgatgacatcacattatgtagcctctagaacatcactgtatacttgtgagagaatgagtgaaagtagaacaaattacatctgaatattattatgaaaatagtacatatttcaaactccttgaaagggtctccctgtgagtccctgaatcacactttgagaactgctgctctacagtattccattgtgtgaaaacaccacaatttatttagctattctgctgtttgtggacatttatctccactttttacctgttgcaaatagttttactttgcacattttttttttttttttgagacggagtcttgctctgtcgcccaggctggagtgcagtggcgcgatctcagctcactgcaagctccgcctcctgggttcatgccattctcctgcctcaacctcctgagtagctgggactacaggcgcccaccaccacacccagctaattttttatatttttactagagatggggtttcaccatgttagccaggatggtcttgatctcctgacctcgtgatccgcctgcctcagcctcccaaagtgctggaattacaggtgtgagccaccgcgcccggccccactttgcacattcttacagtacgtgtcttttagtgagcatactatgcatttctgttgggtatacgtacttagacttgggatggatgggtcatcaattcagttctgagtggagattttgaaatatctgtaggaaattcaagtgagattgttaacaggaagttggaggtgtctgtctccacaacttagtaaagaagccaatgttgcatattgaaatttgggagtaggccaggcatggtggctcatgcctgtaatcccagcactttgggaggccgaggcaggctgatcacgaggtcaggagatcaagaccatcctggccaacacagtaaaaccccatctctactaaaatacaaaaaaaaaaattagccaggcgtggtgccgcgcacctgtagtcccagctacttgggtggctggggcaggggagtcgtttgaacctgggagacggagtttgcagtgagccaagatcgcactactgcactccagcctggcaacagagcgagactccgtctccaaaaaaaaaaaaaaaagtaatttgggagtcatcattatacaattgacagtggaaccagaaagtttgcataagattgtccagagcagaataagttgcgtaaaaaggggaccaagaactgaacctaggggaatatcaacatgtccctgatgaatataggaagggaaagccatgactgagaaagaagggttggctggaggtaggagaaagttgtcattgtggaaaggttgtgtaaaatgttggaaagggtaaattgggctttgctgtggaactcattgttcactttggtgagtggatattcagcaagaatgtattgagcttgtccatgcgtcaggtactgttctaaatgtggaggggaggtacagcagtggacaaacaggaaaagattttttctaaagataggtgatccttagatatgtatagtgatgggaagagggagaatttggagacatgggaaaggcaaagcaaggatcttttcccaccttctctgtcagatgaactcctcatccttatgtcttggtatatgaggcctttttcaggtaatgaattttgttagaattgtttgtgagcaagaggaagtcacttctgagcaaaggcctgagggccgcctgtaagaaaaagtttgggctaggccgggcgtggtggctcacgcctgtaatcccagcactttgggagactgaggcaggtggatcacctgaggtcaggagtttgagaccagcctggccaacatggcgaaaccccacctctactaaaaattagccaggattggtggtacatgcctgtagtctcagctgctcgggaggctgagacaggagactcgcgtgaacccggggggcggcagttgcagtgagctgagatgggtccactacactccagcctgggtgacagaaggagactccgcctcaaaaaaaaaaaaaaagaaaagaaaaagagaaagtctgggcttcttgtcagccctttaggtagttctgagacccttttcactgacttgtagattgctcaacaactttctagaagatctgacctccagataaatgaggttttacaggattatgtaatgtctatttgtgtctctataggacagtgagctgtgacagcttagggaatgtcagtccatttaaaagcataactatgggaattagaaattgataaatattgcaaaatctcattttatttatctaattgttttgagtagccattccacagattttgaagtacaccgaaactggcttgctatcactcacagtttgccaatatcacagtggtattatgaggtaagttttaattttcacctttttttttttaagattcatctataaactaggtaaatattactgatattaaaaatgttttctggctgggtgcggtggctcacgcttgtaatcccagcactttgggaggccaaggcgggcagatcatgaggtcaggggttggagaccagcctggccaacacagtgaaaccctgtctctactaaaaatacaaaaattagctgggtgtggtggtgggcacctgtaatcccagctactcaggagctgaggcaggaaaatcacttgaacctgggaggcggaggttgcagtgagccgagatcgcgccactgcactccagcctgggtgacagagtgagactctgtctcaaaaaaaaaaaaattttcttgcaatcatagatctaattaatctttataaaaattgtggtctcttctcagttctgtcctcttgcactactagggaatccccttacttcaaaatgagtttcccagtctataaattgggaggtataatatctaccacactttttgaaagaatagtggactgggaaagaggaagaactggattcttaggcctggctctgccactatctagttacatagagaaaagatacttcatgtctctgggccttagtgtctcatctggcacatgaggatttggagtgaattatttctaagatcctgtctgttcctaatgttttgtgattttgtgaggaaaggaataatcaaatgtgatgtgtagacatcaggtaatatacaaaccattctctcatattgtttataaaaactatgtctgtatttttatttctttttcttttccttttttttttttttgagacagagtctcgctcttgtcacccaggctggagtgcagtggcacaatctcagctcactgcaacctccgcctcccgggttcaagcgattctcctgcctcggcctcccaagtagctgggattacaggcgcccgccaccatgccccagttaatttttgtatttttagtaaagagggggtttccccatgttggccaggctggtctcgaactccggacctcaggtgatccacccaccttggcctcccaaactgctgggattacaggcgtgagccactgcacccagcttgtatttttgtttctggtatgaattactaaactgtgtgtaatactttatgaaaaacagacattactccagaaatttcttcttttttttttgagacggagtctcgctctgttgcccaggctggagtgcagtggcgcgatctctgctcactgcaagctccgcctcccaggttcacgccattctcctgcctcagcctcctgagtagctgggactacaggcgcccgccaccatgccaggctaattttttgtatttttagtagagacggggtttcaccatattagccaggatggtctcgatctcctgaccttgtgatctgcccgcctcggcctcccaaagtgctgggattacaggcgtgagccactgcgcccggcccagaaatttcttgatgaaaagcagtactctgctgacagggagttggattttgttttgttttcttttcttttgagacgaagtctcactctcacccaggccggagtgcaatggcacgatctcggctgactggcgacctctgcctcctgggttcaagtgattctcctgcctttagcctcctgagtaagcgattctcctgccttagcctcctgagtagctgggattacaggcacccactaccatgcccaggaaattttttttttttttttgtatttttagtagagacagggtttcaccacgttggtcaggctggttttgaactcctgacctcaggtgatccacctgcctcggccttccaaagtgctgggattacaggtgtgagccactatgcccggcccagggagttttttttaaggcaaattttttgcaagtttcctatgagtttcgataccatatatagtattttatatgtatatataaaatggaataccataacccatgaggtagatactactatccctgttgtataggtgcaaaaagtgagacttaggctgggcgcggtggctcacgcctgtaatcccagcactttgggaggccgaagtgggcggatcacgaagtcaggagatcgagaccgtcctggctaacatggtgaaaccccgtctctactaaaaatacaaaaaattagccgggtgtggtggcgggctcctgtagtcccagctactcgggaggctgaggcaggagaatggtgtgaacccgggaggcggagcttacagtgagccaagatcgcgccactgcactccagcctgggtgacagagcaagactccatctcaaaaaaaaaaagaaaaagaaaactgagagagaaatctaacaaaatatactattctaaagcttgtatattttcatatgatttctgttttcatttactcattagcaactgttcctttaactagtggttattttatcccaagcaatatgtcaggcacttactaaatgctgaggatacaaaatgataaaggatagtttctattctccaggatcatataacttactgaaacaaaatataatagcatttgtgtattattttgttgtttataaatatatttcatatgtattatctcatttaatcttcataatacctcattttacaaatagggaaattgtgtctctaagacagaatttgaacctaagttagtgaattatttgttatttagatgagtagaaccatgtcataaccaagtttatcatctccaggtttcaaattaatttcctttaagtgtagttgactctatttaaggaaattgaagaccatgttaaataatttacaagacaggttttagtgttctgttcagtcttacataggaattgttctattaatttagggcatattttaagtgcaacagcatttcactgtgatttttgttcgtttgtttttaattaaaaatagagacagggttttaccatgttgcccagactggtcttgaactcctgggctcaagcgatctgcctgccttgtcctcccaaagtgctggggttacaggtgtgagctaccacgcccagccttattgtgctgttttaaagaccagagaatgaaaaattttaaatcgttgcaccatctttgtttattcagttatttaggatatgtctgatcttctatttttatcacaggcaacttcagagtggacgttggattacccccctttctttgcatggtttgagtatatcctgtcacatgttgccaaatattttgatcaagaaatgctgaatgtccataatttgaattactccagctcaaggaccttacttttccagagattttccgtcatctttatggatgtactctttgtgtatgctgtccgtgagtaagtctggagcatgtcattttgtatggaaggtattgaaaaaatagtacagtgttaagtagtattaacttactcccaatttaggaggaacaaagtttatatgatagcaaatgctaaaacaatgaaaaattgtattgtgctttaaactacatgtttaaagcactctagctgaatcttgtggaagaaatggggataaggtggagttacaaggcagaggtagaacaagagattatgaatgttgtgaaaagaagtagtcccaagtatagttctagggccatttctcccacccagaatagctccatatgtttttctttgcttccttgcagcaggccgccagaggcttccatcacctaccctatcttagggtatgcacacagtacatgcacagtagcgcacacgtatggattgtgctaaccaccaaagtctgcttttacggagctttcattctagtaaactcaagaaatttcactgagtgcttttagttgtttccatatactttccttcatgaagactctttgttattttaagttatgcttatattttaaatttttatgttttacaacttttacttataagttaattttaagtattgaatacacatatatagaatgtcttgcacagtgacttccaagtactaagtttcagttaatgtcagtttccattctttcctaattcttttttttctttttttttttttttttttttcttttttttccctgagatggaatcttgctctgtcgcccaggctagagtattgtggcgcgatctcggctcactgcaactgcctctcgggttcaagcagttctcctgcctcagcctcccaagtagcttggattacaggtgcacaccaccatggcaggctaatttttgtatttttagtagagacagggtttcaccatgttggccaggctggtcttgaactcctgacctcgtgatccacccgcctcggcctcccaaagtgctgggattacaggcatgagccgctgcaccgacctcattctttcctaactcttaagctcgctggtgtgattgtgacagaacagtgactggtgttcattcagtgacccttgtcataaatggatcgtttctgtttgtgaggccctctacactgaacccttgccccactcagtaaagagtcccttgggaatgtctttaacccttgcgcattctcattgaataatcctgtttgaaacccttcctttcaatctgtttatgacctggcaagagttgaaagggaaggtaatttttaatatactctttttaactcaaaatgtttgaattcaagcttccaggggaagagtatacaagcacaaagggagaggaaatagaattcatttccatctgcaaagtagagggaatagttaaaaagattgttgaaaggccaggcatagtgtctcatgcctttaatcccagcactttgggaggccaaggctagtgtattgcttgagctcaggagtttgagaccagcctggataacatggtgaaaccctgcctctactaaaaatacaaaaattagccagctgtggttgccggggactgttgtcccagctacttgggagcctgaggcagaggatctcttgaacctgggtggtcaaggctgcagtgagctgtgattacgccactgcactccatcctaggcgacagactgagaccctgtctcaaaaaaaaaaaaaaaaaattgaaatctctgtgtcagttcccagaaccaagcatgatatacagattattaacttatttaattttctcagtgaccctgtaagtttactgcctctattcatgagggaactgaggctccatagggcgaaaggaggatacctttgctagtccccctttaattgcatctattatttgttttagatttattgttaaaatttgccactcttcaaatgtagcacattttcaatatcgtctttttatagaataatacatccccattgtaaaaactttggaaaagcacacacacatgcaaagtaaaaatgagtcatactcccccacgtatactaatcactattaacattttggtgtatgttagttcagtctcttttctgtgttcgaatataattttcataaaataaaaataggatcttactgttttgtcacctgttattgtcacttagtaatatatctcaacatttaaatgacatacatttttacataaaggtttttaaattataatttggacagtcaggaggtgcacatttgcagttctgttcttaatttggctggtattatgatatataatttagagtgttaaattagcctggtctgcagtttttactcttaaggactgaaataatgtatgctctctcagttttcaaaatccttactttggggtttacgtggctttttatttttaattttgttaaatgaagactttgttttagatcagcacagcttagaaaaagacgtggaacaggccccgaggtccttgtttgtgctaccattttttctttttttttttttttctagtgagaaggtcttactatgtcgcccaggctggcctcagaccccaagctcaagtggtcctctcacttcagcctcctgagtagccaggcacctgccaccctgctcggcttgctgtgacctttttaagaaataaagaatggcatggactttggggtgccagggcaggaggattgcttgagcccaggagttcgagatcagcctgggcaacagtgataccccatcccttctaaaaaaagaaaaagaaaaattggaaaaaaaaaaaaaaaagaatggcatgtagtttgtcaggaatgactaatgtatcatagtttactctgcagaagtgatgttccgatgaagatcaaagttgtttctgtttctttcctaatgtttcaatgtaggtgctgtaaatgcattgatggaaaaaaagtgggtaaagaacttacagaaaagccaaaatttattctgtcggtattacttctgtggaacttcgggttattaattgtggaccgtatccttgatattctatgtactattcccttactaattctgatgtatactaatacaagattaatgttttctataataatgattggagatgtgagctccttctgaaaatgagtgtggggtgggttagtaggctcacttaactgtggtctctgcccaacttcactggactctgaggttagagtatttcatttctgaaaaattagtgggatatgtgagaaccagctaaatcatcaataaaacaatgtactgagattgtgaactatttttagattaatctgatacatatatattaaatagttttgtaacacattattccaaatacctttaattggaaaaggcatatcacagtgtgcgtgtgggaatggtcaggcatttgtgcttttctaccatcttggcttaccacatattaaaaggcaaagtttttaaattcaaggcttctggatgtaattaaaatccttgtaatggaaactaatagttgcagttttcataaaggtagcctggtgtggaggaaagcacccagcctctggtttcaatgtaacctggacccaaatcttagttgccattagcagctttagaaccatgagtagatgaatgtctctgaggcttaatttcttaatctctaaagtatctctaaagaggaaaattctaaatacctcacaggttcattgtgaggcttaatacataagattgtatatgtcctataaacaatgcaatgctgcatgctggtggccttagtagcagttaggtccattcctttctcatccctaattctaaaaaacaaaaaacttcttgcccctgagctgcggggcctttaaggtagaaaaggtaggaaaaacctgggaaagttttgtttttcttcttaaacataaatttgtttttaaataaaaaaaatttatatattttaaatcatctagtctaagatgtcattaaacataagtttctttccttttcttttttttttaatttgagacattcttgctctgtcacccagactggagtgcagtggcacaatctcagctcactgcagtgtccgcctcctgggttcaggtgattctcatgcttcagcctcccgagtagctgggactacaggtgtgtgccaccacatctgactaagttttgtattttcggtagagacgggggtttgccatgttaaccaggctgatcttgaacgcctggtcccaagtgatctgcccatgtcagcctcccaaaatgctgggattacaggtgtgagccaccacacccccaaatgtaagtttcaattaaagatctgactatggtgtttgcttcagcaaaattggaatgatacagagattagcaaaaataaaaatatgtgtttaggccgggtgcagtggctgacgcctgtaatcccagcactttgggaagccaaggttggggaatcacgaggtcaggagttcgaaaccagcctggccaacatagtgaaaccccgtctctactaaaagtacaaaaaaattagctgggtgtggtggtatgtgcctgtagtcccagctactcgggaggctgaagcaggagaatcgcttggacccaggaggcagaggctgcagtgagccaagactgtgccattgcactccagcctgggtgacagagtgagactccatctcaaaaaaaaaaaaaaaaaattaaaaaaaaaatttgaatctgtttatagaaaacatatttatgagcagtccacattagtagtagtattttttgtctttaattttgctattaaagcatttggaatttctatactccatcagctggtatagttcattatgaatttggtgtcctctgttgtctttccttgacctaagtccagatattcattttcagtacaatggctttttatttggattaatgctactctccattgcacgattatttcaggtaaacataattgtttaattagattttttcccttttagattagtttttagattgtaaagggaacagtgtagtgggtgataggtaaatttatttgactgttttgagctgccaagtgcgatagacacttttattaggtatttctcacaaattccatcttctcttttgaccataattttcttcatttaacagatgagacaattgtactccaaaagcttgttagcatgcggcaggcctgaattaaattgagtttttgtttgtttgtgttttgaaacagtctcactctgtcacccagactggagtacagtggtgcaatctcagctcactgcaacctctgcctcttgggttcaagcctcatgagtagctgggattacaggtgcacaccaccacacctggctaatttttgcatttttagtagagacagggtcttgccatgttggctcgaactcctgacctcaagtgatcctcctgcctcggcctcccaaagtgctggaattataagcatgagcccctgtgcctgccctaaattacattttctttgcttttgttttttttttttttttttttttgagaatgagtctcgctctatcgcccaggctggagtgcgatggcacaatcccggctcactgcaacctctgcctcccaggttcaagcaattcttgtgcctcagcctcccaagtagctgggattacaggcgcccaccaccatgcctggctaatttttgtatttttattagagatggggtttcaacatgttggccaggctggtctcaaactcctgacctcaagtgttccgcccgcctcagcctcccaaagtgctgggattacaggcatgagccactgtgcccagccccgaaattacattttgtctggttgggataatttatgtacaaatgaagtctctagcagcagtctttacaatataataactatgatagtgatactttactgtcagcagcatgaagattaatgtaatagaaagggatttggaatcagaagaactgtgtgtaatcctgactaatgttaatgagctatgcaactcagggcttactcaaatacatggctactaagattacatacattccatgtatttttttttctttttttttttttttgagacggagtctcgccctgtctcccaggctggagtgcagtggcgcgatcttggctcactgcaagctccttctcctgggttcacgccattctcccgcctcagcctcccgagtagctgggactacaggcgcctgccaccacgcccggctaattttttgtatttttagtagagacggagtttcaccatttacagtatggtcttgatctcctgacctcgtgatctgcccacctcggcctcccaaagtgctgggattacagacgtgagccaccgctcccggtcttttttttttcttaagagttggagtcttgctctgtcacccaggctggagtgcactggcgcaatcatggctcactgcctcctcaaactcctgggctcaagcaattctctcacctcagcctcctgagtcgctagaattacaggtgcacaccaccatacctggctaatttttttttttttttttggtagagaaggaggtttcactatgttgtccaggctggtcttaaactcctgaccacaagtgatcctcccactctggcctcccaaagtgctaggattagagacaggtcttgaactcctggccttgaacaatcctcctacctctgcttctgagtctctgggattacagatgtgtgccaccacacctggcttacatatatcttattgagtaaacttcagaaccattctgtgaagttgttagaattattattcctcctatagaggaggaaatcagaaattcagattttggggccatccctttgtacatggaatcgaagtctctgggaatggggcttaagactctctaaggaattttgatacaccatcaggcttgagaaccattaactgaaggcaagttatttaaccctcctagcctcattttccccataaaatgaaatttaccgctacattcttagttgtaaaatggggctacttacctcacagggacattggaaagatcaaatttgataatctaaagttctttgtcaactataaatgtctggataaacttttctcttttaaccataaaaagcttcatagtaattagaatataactggtgttcaatgaatatttgttggatgcttattgaacaaataaaatttgactatggaatcagctagaccttacccagatcttaaataagttataaaattgaagagagacctagaagcattcccactcttttttgttattactcctaaagctaccaattctagaccgcacctgatgagagaaggaaactggcctttcatggtccctgtggcagtttcccctgcagaacatcaggactgttatctcatttaatccttccgaaattcctgtgaggtggatagatttcagactttctttttttttgaagacaacgtcatgctgtgtcacccaggctggagaatgcagtggtggagtcacagcacactgtaacctcaacctcctgggctcaaacagtcctcctgcctcagcctccagttagctgggaccacaggtgcacaccaccactcccggctaattttttgtatttttactagagacggggtttcgccatgttagccaagatggtctggatctcctgacttcgtgatccacccacttcagcctctcaaagtgctgggattacaggtgtcagccaccccacccagccaaattcttactataacttcttagttatagtaagctggttttgttttgtttgtttgtttgtttgttttggagatagcatcttgcattgtcacccaggctggagtgcagtggcgcgatctcagctcactgcaacctccacctcactgcaacctccacctcacgtgattctcgtgtctcagcctcccaagtagctgggattacaggcacccaccaccatgcctggctaattttttgtatttttagtagagacagggtttcactatgttggccaggctggtctcaaactcctgacctcaagtgatccacccgcctcggtctcccaaagtgctgggattataggcatgagccaccacgcctggcctttgtttgttctttttacatcagaatacctttagttttcctaagtagtgtttgtatcaagtgcagtgactggtgccttcagcctgatagtgctatataagttacctaatctacaatataaaattcaattgatttttttggtagcatagcatcctatatatttgttcatgttctcattcccagcccttctttggaaatcaactccagctattctgaaactgtgaggggtgaaggtaatttaattctctgggctctaattcctaaaggagagtttgcagtatgttattactgatgacatgtaggatatgatctcagcataaggcttagtatgtgataaatctttgttggaatagtgaatttatgaacacattagactcagtataaaagctagctgggctggtcgcagtggctcatgcctgtaatcccagcactttgggaggctgagacaggtggatcagttgaggccaggagtttgagaccagcctggccaacatggtgaaaccccatctctactaaaaatacaaaaaaattagccaggcgtggtggtgggcacttgtaatcccagctacttgggaggctgaggcaggagaattacttgaacccggaaagtggaggttgcagtaaacgagaccgtgccattgcactccagcctgggcaacaagaacaaaactccgtctcaaaaaaaaagctagctggaatcacttgcctatgttttccttatactggttatagaatatttaccttgggccaagcatggcggttcacgcctgtaatcccagcactttgggaggccgaggcaggtggatcacctgaggtcaggagtttgagaccagcctggccaacatggtgaaaccctgtctctactaaaaaatacaaaaattagccgggtgtgttggcacacgcctgtagtcccagctactcgggaggctgagacaggagaattgcttgaaccgaggaggcggaggctgcagtgagtcaggattgtgccactgcacttcagcctgggtaagacagagggagactccatctcaaataaaataaaataaaataaaaatttaaaaaagtaggtattgtttatttttgttatttatttattcattttggagacagggtctcactctgtcacccaagttggagtgcagtgtcgtcatcatggctcattgcagcctccacctcctgggctaaagcagattctctcacctcagcctccagagtagctggtgctacaggtgcaagccatcacgcctagctaattttttttattttttatttttttgtagagacagggcctccctattttgtccaggctggtcttgaactcctggggtcaagcaatccttccacgtcggcttaccaaagtgctgggattgcaggtgtgagtcaccacacttagcctaattttagttttttaaataacctttttgtaggataattttagctttccagaaaagttgtagaaatagtacagagagttcctatatatccctcacccattttcccccattaccaccttacataaccatggtacattcatcaagactaagaaagcaatattgatgcatttgaatttcacccgtttttcctttaatgtccttgttctgttccaggattcaatctagaataccacattattgcatttcatttaccctgaattttaaagtgatatttcccttttaaatctcctagaaaaggcatatggaaggagcatttctctttgctgttctcctacatttcaagcatatctacctctatgtagcaccagcttatggtgtatatctgctgcgatcctactgtttcactgcaaataaaccaggcaagttttggtaataatagcaaaaacattttcgatttttcccttactgtgttgacttggtggcttgcttgataagaaggttttatgaagcacagcagatatctcagctgctaatcctgtaagccctttacccattctcgcttttctctgctcttgccacatcatgaatagattggtatactattgtgggatacttctagttttagcacatgatataggttatggttaatgttcctttccatcttcctggttactgataatgttccttttctgtagatgggtctattcgatggaagagtttcagctttgttcgtgttatttccctgggactggttgttttcttagtttctgctctttcattgggtcctttcctggccttggtaagcctttttttttttttttttcaattaatacatgttctttgttggtgtttagaaaacctaataaagccaggaatatgtaaaataagtaaaagctacttttttcttactccttacccaacgtgactccccaaagatagggcagtattccttttttttttttgtttttgtttaagatggagtctcactgtgtcgcccaggctggaatgcagtggcgtgatctcggctcactgcaacctccacctcctggattcaagcgattctcctgtctcagcctcctgagtaggtgggattacaggcacatgccaccatgcctggctaatttttgtatttttagtagagacagggtttcaacatgttggtcaggctggactcgaacttctgacctcaggtgatccacctgcctcagcctcccaacgtgctgggattaaaggcatgagccaccgctcttggcccgataaggtagtattctttcagacatttttgtgcacattcaaatatgtatatatatatacatgtatatgtttaactgtacattacacatacacaaacacagaattgatcttcattatttgtgtattctgtacttgtaagtttacttacttgataaaatgtatttgtaacaaaatcaataattttgcagtcttacatggacagcagacattctaaagtgcatagaatttaacagatgttcagatgttttctttcttcctcttcttccctgccctgaaatcaactaattaattttaattcttactaaaactgaaacgcgtcacatcttttgtagtttcccagctctccccttcaccctagtagacatggataagctgcagtctgtgttctgctttgtagcttgtaaattcttctgttattataatagtatggacgggtattcagagtatttttatgtatattgtcccactggacagtggacaaagtgagaccaaaagaaggttctgtgaacttacattgtggtgagcatataaccacttacttactagaacccagaccccataactttctacacactataccatagagagttccctagttctctttttgaatttgaaaaagattgatgactgtttaatcagtttcatttctcttttcaacagaatcagctgcctcaagtcttttcccgactctttcctttcaagaggggcctctgtcatgcatattgggctccaaacttctgggctttgtacaatgctttggacaaagtgctgtctgtcatcggtatggtagcgagcattttttactcagactctgaatattgaaaggacttaggcacatggagaaatggaaaaacctttgtgttttgaatgtggctgaattgtttgttctccagtcctgcatttcagctttcaggatgaacagggggagcagttcttgggactgaggctttagtgcagtaaacagactgttttccttataaaagctccttgtggtaatgaggttattgatcctttcctggggaaaaaataaaatatgtagacactctataaaggtaatttttgccttaattaaaaaactattcagcagcagcagttaaccctgctttttttccccccttctcaccattcctattcaaacccctacttatttttagagacagggtctcactgtcacccaggatggagtgcaatggtgttgagatcatagtgcactgcagccttaaattcctgggctcaaacagtcctcttgtctcagcctcctgagttgctgggaccacaggtgcataccaccacacctggctgatttttaaatttttgttttttagagatgagggtctcactatgttgcccagagtgggatcaaacttctggtctcaaatgatcctcccaccttggcttcccaaagtgctgggattaccagcacaagccaccatgcctggcctaccccacttttaaacctaaacatacaagaaagaagaatatgtaagttgtgactctcggtattaaaccagtaaggaaaataaccctgcattttaacatgaggtgagaagaaatgaaaaacccaggctatggtttttaaaattgggtcgtaatgaaaaataagttatggtttgagatggttctactaaaaataactcactctggataacacagtctctcatttgtgaatacaatctagcttggtgggaaaatggcatgatcaagagtggtggtcagcaaactttttctgtaactggccagataatattttaagctatgcaggccacacacagtgtgtgtgtgtgtatgtgtgtctgtgtctgtatttgtgtatgcacacatttgtttaaaaccttataaaagtaaaaaccattcatacttcagtgctgtgcaaaaactgggcacaggctacatttggctgttggcctatagtttgtggactccagacctagagtctgatgacttggtttggaggctcacctgtgtaaattgctattgcagtgtgtggcattgacaagtcatttgcttcctttcgtctaactttcctcactatacgaaagacatactagtactttacctgtacctatacagtgtgttgtgaggaacagaagcaaaatttaaaaagtactaggttatcagtagcagagactttggagccagacaaacctgagttcagttttaccacctattagttgtgtgactttgggcaggttactccatctctgtacctcagggggctaaaagtagtaagtgcagagccctgggcacatggtagacgctccatgcatggtggccactattactgtttttgataagtacttggaggagatcatacactgcctatgtgatgacttatacattgtgtcaccgtgttgctcactgtgaatctagccttgatgtacatggcattcttacagagtaattcctaacattcatatttcaaaaaaagctttaaacagccagcatagtatgaggtacaagggccagttgccttgtctgagtcaggaagctgtactgtaccctcacttgtatgtttgtgtctttgaagatgttttacatggaaagtcagtgtcagagttagacaactttgttttagggagatagttattagctgtaagagagaatcagcaggccaaaggggaaaggggaagaggttagtaagtagaaaatattttggtacatctttcccacattgtattcattttcactggcatttgacaggccctataggtgctcaaactgtctctgactgtcctattagccagagcttgttggggcttgtattgtcattctctgaattgatttatttaataaccaagtatttattgagctcctatgtactggggatagaaatgaactcatcatcattcctgccttcaaggaatacagtatagtagaggaaatgagcacataaacaagtgcagtgccttgtggtgaacactgttagagtgagctcactcagctgtgcacgttggctcaggcctgtaatcctagcactttgggaggctgagatgggcggatcacctgaagtcaggagctcgagaccagcctggccaacatggtgacaccccgtctctactaaaaatacaaaaattagccgggcatggtggcacatgcctgtaatcccagttaatggggaggctgaggcaggagaatcgctggaacctggaacctgggaggcagaggctgcagtgagctgagattgcgccactgcattccagcctctgtctctgggtgacagagtaagactccatctcaaaaaaaaaaagtgagctcacaagaaaatcagttctgcttattgatttaggagctttctcaggtgattgaattagaagttaatttggcaaagggagttgcctgggcagagggacacaggtgttgagagtggtatattgaggactcacagttacttcattgtggccaagccgcatttaacaaagtaaagatgagattgaacaggggggaaggggcgatgagatcatggaagacactggatactatgtttaggaatagagggtttctcccataggagatgaaggattcaaagttccttcatgacatgctcagactgttctagaagcttgctttcagaggtgagagcagattaccatttgtgctgcctgccagcaagtttcctataagctgcacaaattccctgttccaatgcaaagagctgctttatatattataatcttaagaccagaggcattttgggtagaatagtataggattaaattcatgaaatcttagcctttaagcagcaataagatttagtagcttactttttattcctcaaggaattgattgttaatatatggtatctcagtaataaagataaaaataaaacaaaacaaaatatctgtttaataggtttgaaattgaaatttcttgatcccaacaatattcccaaggcctcaatgacaagtggtttggttcagcagttccaacacacagtccttccctcagtgactcccttggcaaccctcatctgcacactgattgccatattggtaagaactcaacagatggtgctcatttcttgagttttctctgcttttcttttgtctggctgattaaatttcaactttcaagctcttccaactgtaggataaatttcatgcctgtaatccttctgcagattgaagcatttcctagcaattcttagagtaactttgaataccataaggaaggattaccagtaaagcctttgtgagagattcttgccagtggctgttagaccatctgttcacccgggggaagggaaaaagaaaagcccagagaggaagaggcatggatcatgctgcagagaaagaaggaaatgtttgtggcagggacatccagatttggtttgtttttctcaccgttagctaaatcatcaaaattccaaatgtatctggacagcgtggatgttttgtcttgatggtgataatgagttgagagagtcgacaaaggctttttgagcctaagatgagcctaatatgagtaagatgctcttagaggcctcattctaagtactttagaaactttaatttctaaaatttcattagtgattgcagtgacctcaatttcatggtataattttagtagaattcaatataaacaactcaatcctatcgataattacactcatctttaattttggtttctgaatgtttcaaacctgctagcaaccacctgattccacttaattacatgacagtacaggtatgtagataattaagctctgttgggctgtttgttcacatattttaattgaggtaaaacatttttcctaaaatttcagccttatgaggtacatatagtttctatggccttccagccaataaaactaagtatttattaatatggtaaatctaatttattggctcaaaagcatctatggacttctgtagtttgacctattaggttcattaataaatgaactattagtaaactaattatgaagatgtaataagttgttagactgtacatcccagaacttaattattaattttgatagtataattaatttcttttttttttgagacagagtctcactccgtcatccaggctggagtgcagtggcgattctcctgcctcagcctcccaagtagctgggattacaggcgcctgccactgcacccagctaattgttttgcagtagttttgtttttgtttttgtttttgttttttgagacgggagtcttgttctgttgccaggctggagtgtagtggtacgatctcagctcactgcaacccccacctcctgggttcaagcgattcccctgcttcagcctcctgagtagctggaactacaggcatgcaccaccacgcccggctaattttttttgtattttagtagagacagggtttcaccatgttgtccaggatggtctcgatctcctgacctcgtgatccgcccacctcggcctcccaaagtgctgggattataggcctgagccaccacacccggccttttttgtagtttttagtagagacagggtttcaccatcttggccaggctggtcttgaactcctgacctcgtaatcgacttgcatcagcctcccaaagttctgggattacaggcgtgagtcactaggcccggccaatttttttttttttttttttttttgagacagtctcggtctgtcacctaggctggagtgcagtggcgcaatttcagctcactgcaacctctgcctcccaggttcaagcgattctcctgcctcagcctccagagtacctgggaatacaggtatgtaccaccacgcccagctagttttttttgtatttttagtagagatggggtttcactatgttggtcaggctgttcttgaactcctaacctcaagtgatctgcctgccttggcctcccaaagtgctgggattataggcatgagccaccatgcccagccagtagaattaattttaatgagttaaatatatacatcaaggctaggtgcggtggctcaaacctgtaatcccagcactttgggaggccaaggcaggcagatcacgaggtcaggattttgagaccagcctggccaacatggtgaaaccccgtctctattaaaaatacaaaaattagctgggcgtggtggcaggcacctgtaatcccagctacttgggaggttgaggcaggaaaatcgcttgaacccaggaggtggaggttgcagtgagccgagatcgcaccactgcactccagccttggcaacaaagcgagactccgtctcaaaaaaacaaaaaattatatatatatatatatatatatatttacatataaaatatatttatttacatataaaaatatatatatacacatcaaatgccaattttttctgagttgttgcttttatgttaacttttgttagactgtgcacaaagtgatgaatgattcggtttcatgaagaattgtctaagattggctgtctttcagagatgatgcaaattgtattcacctgaactctgtttctgtaaagtctgtttcaaatgatactgaagtttatctttgcctgttgtttctagccctctattttctgtctttggtttaaaccccaagggcccagaggctttctccgatgtctaactctttgtgccttgagctcctttatgtttgggtggcatgttcatgaaaaagccatacttctagcaattctcccaatgaggtaagcagatagctcagccagtgagcattttggcatatttcacaatgatcctattttctatttgctctgtcccttcttgtcatgttcaccaggataggcaaaaacaaagatgtataggaacagatgtccactaggacaggacagggatgcttaacttgagattcttggacccatgaaggtatgcaaaaatgcatgtactatttctgtttctgcgtttttggaaagaagcactgtagtgattaagtaccatgaaagccggcttttagatctgatcattgagggacagtatgttatagaaaaaacctgggctggccgggcgcggtagctcacgcctgtaatcccagcacttagggaggccaaggcgggcagatcacgaggtcaggagatcgagactatcctggctaacatggtgaaaccccatctctactaaaaatacaaaaaattagctgggcatagtggcacatgcctgtagtcccagctactcgggaggctgaggcaggagaattgcttgaacccgggaggaagaggttgcagtgagccgagatcgcaccactgcattccattctgggtgaccgaaggagactctgtctcaaaaatgaaaaaaagaaaaaacttgggctttggtgtcatcccgtctgaaaataaggtcccatggttccttgttaagtgttgttagtcaaagtaaggatttagtctattctggaataatacctgatactgtactacatttcagattttccagaactgtttttgttttgcattctttcttttgcgcctcacaataatctttaagataattggccaggcatggtggctcacatctgcaatcccagtactttcggaggctgaagcggtggttcacttgatgccaggagtttgagatcagcctggccaacatggcaaaatcccatctctactaaaaatacaaaaattagccaggcatggtggtgcatgcctgtaatcccagctacttgggaggctgaggcatgaagatcctttgaacctgggaggtgaaggttgcagtgagccaagatggcgccactgcactccagcctggggcaatagagtgagaccctgtctcaaaaaaagaaaaaaaaaaaagatagttaaaataaatgggtattattcccttttttttcctttcttttttttttttttactttttggtagagacagggtcttgccatgttgcctaggctggtctcaaactactgggcacaagcagtcttcctacctcagcctcccaaagtgctgggattgcagatgtgagccaacaaaacaggcttattccctgtcttaacatctgaagaatctagggctcaaaatgtttgtgacttgtccaaagtcatacaggtcgcaagaattagagttaggacctgaatcttatgatgttgaatctatgatcttttcactatgccatgctaaaaaaaccattttaaatgtaagtgtccagtttaggcatagttgaaacccaatagataaataaatggtaataatagcctctttctttatatttttcttgaatcttgagaaatcatttaagctctgaacatatattaagcaaatttgtcaggccagtatgtggcttgtctgggtttatttagcagcttggagtttccaaattaaaaagtaaagcaaaaacttttaatgtctttagtctgaattcacaccaaacaccagcaggtgaagggcattgtccaagagatgagctatagggttggaaatgaaactccaagtcctgtttccctgactgccaccactaggcagctcccaatcccacaacattcctgtctttggagaaggcaattactcagggaagcaagattcttttttttttttttttgagacagagtctcgctctgttgcccaggctggagtgcagtggcgcgatctcggctcactgcatcctctgcctcccaggttcaagcaattctcctgcctcagcctcctgagtagctgggattacaagcacccgccaccatgcccagctaatttttgtatttttagcagagacagggtttcaccatgttggccaggctgctcttgaattcctgacctcaggtgatcctcccgcctcggcctcccaaagtgctgggattaaaggcatgagccactgtccccggccagaagcaagattcttttacgatacccctgattcagtttgatacatgctattgattgcttaaaatttcctactaaaaaattaatattctcaactaaattgaacttgtgccaaaatcagcatgttcttctatgcctcagccagttctaatgtaataggagatgcagtttatttaagctatttgcaagtgtaataacagttgttgttttaagaaattatttttatttttagccttttgtctgtgggaaaagcaggagacgcttcgatttttctgattctgaccacaacaggacattattccctctttcctctgctcttcactgcaccaggtaaacagcgtcttctgagaaaaatatatttgactatcacaaccttttcatcgaggcccacagattaatacatctaatttaaacaactctaaaatctcttggatagagatcattcatcctcttaaataaaacctccaatttcctgtaattctcagcatctctagatgtcacaaaaatgtaaaattaaacttaaaaagtattattagcactatatagctgtgtcagtgtgcttatattactttcagcatcataagtctttctgtcatcagctaaattatctttttttttctattcttttaacagaacttcccattaaaatcttactcatgttactattcaccatatatagtatttcgtcactgaagactttattcaggtaatcaaaaaaatgtttaaaattatacttactcttgtgaaatgtttacacctaagtggtcaaataagctctttaaattttatttttaagttataacagtaatatgacaacattacaaaaaaaattggtaaatagagggagaaatcactcaatcccatcactcagtcgagacaacatagtttgtgtctttagtttgggggagtatttgaggaggactacttaaattaaaatcctatatgaaaactcaaaaactgaatgtaaaatatgctttatgaataaaactattaaatacagatagatatggaaaaaactaaaagatactatgtacaaattttttttgttcgtttttttgagacggagttttgctcttgttgcccaggctggagggcaatggcgtgatctcggctcaccacaccctccgcctaccgggttcaagctattctcctgcctcagcctcccaagttactgggattacaggcatgcgccaccatgcccagctaatttttttttttttggagacggagtttcactcttgtcgcccaggctggagtgcagtggcgcgatctccactcactgcaacttccgcctcctgggttcaagcgattctccagcctcagcctcctgagtagctgagattataggtatgcatcactaccacacctggctaattttttatatttttagtagaggtggggtttcaccatgttggccaggctgctctcgagctcctgacgtcaggtgatccacttaccttggcctcccatagtgctggaagtacaggcgtgagctgctgtgcccggctaattttgtatttttattagagatggggtttctctgtgttggtcaggctggtcttgaactcccaacctcaggtgatccacccacctcggcctcccaaagtgctgggattacaggcgttgagccaccgcacccaactatgtacaaattttactacagaattatagatggaaactttttctcttctaaactgtatgtaatgttaactataattttttttttttttttttgagacggagtttcacccttgttgcccaggctggagtgcaatggcacgatctcagctaactgaaacctccgcctcccaggttcaagcgattctcctgcctcagcctccctagcagctaggattacaagcatgcgccaccacacccagctgattttgtatttttagtagagatgggtttctccatgttggtcaggctggtctcaaactcctgacctcaggtgatccaccgtccttggcctcccaaagtgctggcattacaggtgtgagccaccatgcccggccaactgtaattttttaaagcttgcttatggttcataactgtgtccataaaaacttatataattaactatgttaaaatgcagttatagccatgtgacccagcaattccacccctatacccaaaagaatggaaacagggactcaacagatacttgtacatcagtattcattgtagcattattcatactagctaaaagatggaaacaacccaatgtccatcaacaaatacatgataaagtgtgatatatacatatagtggattattcagccaaagaaaagaatgaagttccaatacatgctacatgaatgaatcttgaaaacatgctaagtgaaagaaacgagagaatagaacaaatatcatatcgttccactgataggaaattctagaataaacaaacatagagacagaaagtagattagaggttgagggaacagggggatgggaagttattgttaatggttccagagtttctgtttggggtcacgaaaatattttgaaggtggatagtggcgatgggcgcatattattgatctacttaataccatcaaactgtatacttaaaaatggttaaacaaatagcaaatttcatgttatatatattttaccaaaataaaaaatattttaaaaatctggtgaaaccttgtctctatagaaaatacaaaaattagctgggcatggtggcaggcgcctgtaatcccagctacttgggaggctgaggcaagagaatcgcttgaacccaggaggtggaggttgcagtaagctgagattgcaccactgcactccagtctgggtgacagagcaacgctccatctcaaaaagaaaattttttttaaatcttcaattctatattgtttctcatgttcttattccaatgtcacagcacccaacccctttacctctttcaaatgcagaactaattctctctgagcagcttgagctaaataacagcataggtcaatggtggagtaaatttagattgttgagataatataacgtatataattatcatttttttctaaatgtgaaacttattttttatttttatttattttttgagacagagtctcactctgtcgcccaggctagagtgcagtggtgccatatcgactcactgcaacccagttaaagcagttctcctgcctcagcctcccaagtagctggaattacaggcctgtgccaccctggtcggctaatttttgtatttttagtagagatggggtttctccatgttggccaggttagtctagaactcctgacctcaggtgatccacctgccttggcctcccaaagtgctgggattacaggcatgagcctctgcacttggccctaaatgtgaaatttaatatactcttgactctggccttggctataataattgacagcaagacagtgcagatggggaagctttagctaggaaatgtttgctaaaccaggatgactcatctaaaatcagacttttctctcttttttccttcagaaaagaaaaacctctttttaattggatggaaactttctacctgcttggcctggggcctctggaagtctgctgtgaatttgtattccctttcacctcctggaaggtgaagtaccccttcatccctttgttactaacctcagtgtattgtgcagtaggcatcacatatgcttggttcaaactgtatgtttcagtattgattgactctgctattggcaagacaaagaaacaatgaataaaggaactgcttagatatg

SEQ ID NO: 4 - DNA, 6179 bp, Homo sapiens
aggaggacctgggggtgtggcagcgaggaagggccgagccacggactgtggggccgaaactcgctcccgcccaccctttctcgaggctgtggcctccgcgagagccgagcgggccgcaccgccggccgtgcgactgccccagtcagacacgaccccggcttctagcccgcctaagcctgtttggggttgctgactcgtttcctccccgagtttcccgcgggaactaactcttcaagaggaccaaccgcagcccagagcttcgcagacccggccaaccagaggcgaggttgagagcccggcgggccgcggggagagagcgtcccatctgtcctggaaagcctgggcgggtggattgggaccccgagagaagcaggggagctcggcggggtgcagaagtgcccaggcccctccccgctggggttgggagcttgggcaggccagcttcacccttcctaagtccgcttctggtctccgggcccagcctcggccaccatgtcccgccagaccacctctgtgggctccagctgcctggacctgtggagggaaaagaatgaccggctcgttcgacaggccaaggtaacacggttgctggcaccctcggtttgcagcctcaagatccctgaaagcgggtttgcagtggatttaccccaaccgatggggagggactgagcttgaccaaagagccagaaatgactggagaatgcatcccttgccactgctgcaaggggagaaaaaaggattgatcctcagtgacaacccctccctcatgtggcaggtggctcagaactccggtctgactctgaggcgacagcagttggctcaggatgcactggaagggctcagagggctcctccatagtctgcaaggtaggcgggtcctccccaggatggtcagttcccctcttccatagccagagaaacatccgctcctgcgtttttgggatcgatataattactcggggcagggagtcctgtttaaggcacagaggagactggagtggaatcatctttgtacaggcaaatccctctcttccttacacactcacagagtggcatttgaaaaatggtttccaagatggtctgatctggataacttttttgccctttccagactctctgtccaaaggttgggttctttttttaaatccttagctaattggctggagggtgggttctttattgtagctgttttggttggagtggggtgatctctgagttgggattttatttggaggatcttccatgggggagcagtctgtaagaccaacattgttgctccagggctccctgcagctgttcctgttcttcccttggagctgactgtcacctgcaacttcattatcctgagggcaagcttggcccagggtttcacagaggatcaggcccaggatatccagcggagcctagagagaggtgagggccagagattgtccctgattcccctgccatcttcagtctgggtttaagttattgcagggagatgggaggataaacaacatctgtcacctccatggagagaggtgcccttctctgtgctcttcagaccaggttgaggtattattattgtgacctttggggtcctgcaggagaggaaagccagagtgtgtggggagatggaggatgaggtgctacttcagctgtgtgtgtgtctatgtgtgtgtgtatactctacagtgctggagacacaggagcagcaggggcccaggttggaacaggggctcagggagctgtgggactctgtccttcgtgcttcctgccttctgccggagctgctgtctgccctgcaccgcctggttggcctgcaggctgccctctggttgagtgctgaccgtcttggggacctggccttgttactagagaccctgaatggcagccaggtaatagggaaagtgacctgaagctgagggtctcctccttccttcctcctcctttctctccagctgcagtagcatcatcatgtactggacaggcggctgggttggtggtcggaaaacctggattctctctgggactcttgggtgaccttgccctggttggtctctcattgtggggattctcttaggagtgttttttaaaaattggacaggcatggtggctcatacctgtaatctcagcactttgggaggctgaggtaggaggatcacttgaacccaagaggtggaggcaacagtgagttgtgagctatgatcacgccactgcactccagccctgcagcctgggtgacagagggagaccctgtctcaaaaaaaaaaaaaatttttttttggatagggatagggctcttgtgatcttgctcaagtcagctctcagccttagtctccttattagtaactcaaatatggtccttgccctgagtgaggaggcacgctggaatagatcatcactgccccaggtttttcttccttttttttaattcttgcctcatagctatctatctcttagaattgggggaaactacaggcattatgcatagcttcttgctttgtaagggtagctgaggcctgtgtcctcaaggatcaagaggacccttgagctcaaggtctagccaggatagatggagataggagaagacgaggaggttgtaggcttggagcttctggttgtccttctttccccagagtggagcctctaaggatctgctgttacttctgaaaacttggagtcccccagctgaggaattagatgctccattgaccctgcaggatgcccagggattgaaggatgtcctcctgacagcatttgcctaccgccaaggtcagctagcaacctgactcatctcttctacctttaagtggtcctccagactcatgccctctctcttgtcccattcagttccatgggcttcttagacccttgttccccatcatgacccctgctctatagccctctccaagctcacaccctgactgtcctcaggtctccaggagctgatcacagggaacccagacaaggcactaagcagccttcatgaagcggcctcaggcctgtgtccacggcctgtgttggtccaggtgtacacagcactggggtcctgtcaccgtaagatggtaaagacagtcctagggtggattggggaaaccacaagcattatgtatagctttttgctttgtaagggtagctgaggcccgtgtcctcctatccctttagggaaatccacagagagcactgttgtacttggttgcagccctgaaagagggatcagcctggggtcctccacttctggaggcctctaggctctatcagcaactgggggacacaacagcagagctggagagtctggagctgctagttgaggtagggaactgccaggtgaagatgtggggtggaggattcctgaggtgcttgtgatggggtgacttgactagtcaagatccaagtataaggaagtatggctcccaaagattatagatacaatttttttctttctcttttaggccttgaatgtcccatgcagttccaaagccccgcagtttctcattgaggtagaattactactgccaccacctgacctagcctcaccccttcattgtggcactcagagccagaccaagcacatactagcaagcaggtgcctacagacggggaggtgaggttccccttgctcacctgagcttctcttcccacttctgatgcctcccctggggtgtgactctgcttttgttcttgtgacttgggggatgaatgaggcagtggcaggacataggtcgccactcctcagcctcttaccttgcttctagacctgaactgaggactcttctctaagacattaaccttctctatctttgacactctgaagtctcttccccagtccattctgtaactggggtagatccatactgagccaaaattggagccctaagaccttccctccctttctcctcctcagggcccatgaacatccatctgttagctaagagagaacattctcaggacccttgcaggttccctgctagggcctagggtgaggcttatgggcttttactcctcagggcaggagacgctgcagagcattacttggacctgctggccctgttgctggatagctcggagccaagggtgggtgtgtcttcaagcttctctgcaatggggtagacgggttggtgtcccctttgaaatacagcaagactgcaattttttgttttttcctctattctgtctgtccagtctgggggcccaggactctgcatggtaccagagcctggtgaagaggttggggatggtggctcatgcctttcaagacactgcttcttcttcccactccagttctccccacccccctcccctccagggccctgtatgcctgaggtgtttttggaggcagcggtagcactgatccaggcaggcagagcccaagatgccttgactctatgtgaggagttgctcagccgcacatcatctctgctacccaagatgtcccggctgtgggaagatgccagaaaaggaaccaaggaactgccatactgcccactctgggtctctgccacccacctgcttcagggccaggcctgggttcaactgggtgcccaaaaagtggcaattagtgaatttagcaggtgagcccggggtcctagagggggtgtggagggatgattttctgattgggacctgagttggtgagctccatgttcacctacttaccctagagtttctgaaattgattcctcttcacccctgttctgtgtcctacttcaggtgcctcgagctgctcttccgggccacacctgaggaaaaagaacaaggtgatctaaactttcagttttcctcttacctcctggaagtggtagtggtggaagtgggttccctttaatgtgtcccagcccaccaggagacttaagagaaagggactgtggacacaagaagaaatagaggaggatttggggttttggtgactgtgaggctgggaagacacttcttgactttgggagtggtccccaggggcagctttcaactgtgagcagggatgtaagtcagatgcggcactgcagcagcttcgggcagccgccctaattagtcgtggactggaatgggtagccagcggccaggataccaaagccttacaggacttcctcctcagtgtgcagatgtgcccaggtatgtatacttgcatgacgtcggctatgcatagatgtgcaaggacagagaggcccatgggaaatacttgggcgtaagtgtaagagtggtgttctcagacaggaggggtgattggggttgtgctatatatacctagggatatatccaggtgttcaaatatacacagtgtgtatgcagggctcccaagagttccctggtttccccgatatcctcagacacaaagaccatgactctgctgttgtgggttgcacaggagtagggggcagatgatggacactgggatgggaatggttgtgaatgatctgcccccgcttccatatgtgagtgtaggcaagatacttcctctctctaggcctcagtttccctttttataaaacaatgcctaagactatgtcaagttctaagactctgtactctgggctggggctacaggtaatcgagacacttactttcacctgcttcagactctgaagaggctagatcggagggatgaggccactgcactctggtggaggctggaggcccaaactaaggggtcacatgaagatgctctgtggtgaggctcaggcctgctggcttggggctgaggggcagttggtgtcctagagtccttggacctattgtgggtggtgaacactgaaagcgggggtatggctgcccagctttctgccaatctttcacccttaggcatcatccttctttctctccaggtctctccccctgtacctagaaagctatttgagctggatccgtccctctgatcgtgacgccttccttgaagaatttcggacatctctgccaaagtcttgtgacctgtagctgccacgttttgaagagcttgagctgggtccccagtgggctgtctctctgtggggagggctttctgcttcaccatcattaggaatgtgaccattcctatataattcctggactggtgagattggtggtaggcctgtgaaatttgccctagttactaccattctcgttttggaggaaacaatctctgccaccaccaagtcattgactttgctcgaggcaccttttttcctgtttctccttttctgttgtcgagtaaaatttcatatttat

SEQ ID NO: 5 - DNA, 12265 bp, Homo sapiens
accagtagccgcggacctcggtgagtacaaggtggtggggggtcgccagcaggttccctctccccggccccagctctggacgctcaccccagtgcaacgccctgagtgacggaaagaggtaggaccgcgcctgcagcgccggctggagggacgttctggtccccagacgctcctatcagggactgtttgatcccgatcgccggcagcgggaatgccccacgcgggtggggtgaggagaagggagaaggagaaaaacttcccctccggaaaataataaatggccacgataacagaagcatcggtggcagtcatcccgctttacctggagcggaatcgctcgctcagtctgagcctggaggtgggaagaaggtccagtccgaacgcccagggcggtgtggggagtggacgcctgggggccgggaggacctacttagtataagaaaaggagagcaatgggtggtcagggcggaattgaaaggaaactgaccggccccaggggagaaggggaggggagagattctgtgcttggggttctgaccctctcgggtggccccatttagctaatttgcatcaagattcagcagccgatgatgtctgtatgtgtgtgtgtgtctgtggacacgtcaacaccttggttaattaattaggtctggcggcttctctgttgacaactcagctggttccacaccctggcaattgtgaagagttggccaaatgtttgtccactgagctgatctcctctctggagcaccggggccaccaggagggaggtctgtgaaacccctgcccctgccattgacctaagtgttgggctcttgaatctaacagactagtttttcaagtcgtgggggatgggcttgggcatttttccctgaaaccttcggaaatccttgccttggagactgaaaggataaaggcctctggggccaggtcaccagggacaatggataacgcctgcctctaccctcctgggcacaccctgtgtgatctttcttaaaccagtttcttatcaggtcacaccttggctccacagtctgcctttctacatggggcacgggtgaggaccagagtttgctccctcttcctccaccctccagcttgcaccaaggaaatgatttttttttttttttttttgaaacagagtctcactctgtggcccaggctggggtgcagaggcgtgatctccgctcactgcaacctccgtctccctggttcaagggattctcctgcctcagcctcctgcgtagctgggattacagatgcgtgccaccacatccagctaattttttttgtatttttagtagagatagggtttcaccatgttagccaggctggtcttaaactcctgacatcaggtgatctgcctccctcagtctcccaaagtgctgggattacaggtgtgaaccactgcacccagcccgaggaaagatttgacctgccagcttcactggccactttacaaaaatggggattgcatcaatatgaccaaatctcccttgttttttgtttttttttttttttttcctgatggagaaaacaaggccctatactggccctcccttaatttcattttatccagggatttaacagaattctttggccactctaatcctatctaagtcatttagtaagtactcaccctagagactagggggtttctcttgaaactcaagtgttaatctaggctcaggaaagaccctgggggctggtgaggcctgactaaattggagtgacagtggtcagagaaaataaaaaatgcaagtagggcgtgttggcgtgggcctgtaatcccagcttctcggaaggctgaggtgggaggatatcttgagtccaggagttcaagattagcgtgggcaatacagcgagacctcacctcaaagtaaataaataagtaaatgtgctttttaaaaaattagaaaatgcaaggccgggcacggtggctcatgcctgtaatcccagcactttgggaggctgaagcaggcagatcaggagtttgagaccagcctggccaacgtggccaaaccgcgtctctactaaaaatacaaaattagccatgtgcagtggtgcgcgcctgtagtcctagttacttgggaggctgaggcaggagaattgcttgaacccgggaggcggaggttgcagtgagttgagatcatgccactgtactccagcctgggcgacaagagtgagactccgtcttaaaaaaaaaaaaaaaattagaaaatgcaactatcccttaattccattcacgtggtcttccctgtcaggaaaaaaaaaaaaaaccttggagtctcccttggctgctctttccctcaaattatatatcccttatcctgtccatcaccgagggctcttgacctttctttttttgtttgtttttgttgttttgagatggagtctcactctgtcatccatgctggaatgcaatggcacgatctccgctcacttcaacctccgcttcccgggttcaagcgattcttctgcctcagcctcccgagtagctgggattacaggcacgcaccaccacacccagctaacttttgtatttttagtagagagaggtttcaccatgttgaccaggctggtctcatcctgacctcaggcgatctacccacctcagccttcaaaagtgctgggattacaggcgtgacctactgcgcccagcctcgacctttcaaacatagcctaatctgaccacttctccccattcccattgtccccagcccatactagacgccatcttcttccacctggaccactacagtgacctcctcattgcgttcctagtgtctcccttcaatctcgtttattgtccatgcagcaggcagaggatcctgaggaccttaagccagattctgcccatccttcactcagaactgtccagtggcttcagtctcagagtagagacccaaattgtcatcacagcccacaaggcactctctctgtccctgcccccacctcctccacactggccttgctacgccccaaagccaccctttccatgatctttgcattttgctcttccttctgactggaatctccacatggctccattcctaatttcattcaggtctatgctcaaacgtaatcttatcatagggatctttcctgggctcccttgaaactaccctctatcccccaggctgggtcaggtgtctcctctggactccttcattccagccctactcactttgggtcatcactgcctaaggacaggtctgtgtcccctattggactgtgagcccacaaaggcggaactgggctctcagtcctagacgtgtttccaagaccgcccaatgtgggtcatgcacagagcaggcactcagatgatgtgctaacaatgctagataatgtggatgagtgaatttttttttttttgagacagggtctcatactctgtcacccaggctggagtacagtggcacagttatggctcactgcagcctccacctaccaggctcaagcgatcccctcacctcggtctccttagtagctgggactctagtcgcacactacccatgcccagctaatttttttttttttttgtagagatggggttttgctatattgctcaggctggtcttgaactcctacgctaaagcaattctccagcctcagtctcccaaggtgctgggattatagttgtgagccaccgcacctggctagaaaacttttctttggtgcataaaaatgatataaaattcaaatttcagtgtcccagtaagtaaggttttgttggagaacagccatgttcatttgtttccatattgtctatggctgctgttgtgctactgtggcagagttgagcagtgacagtaaaatacttacagagaaggttcgcagacctctgctacgtattttgccaagaagaaaaataaaataaagttaaaattgaaaatatgttgcccgctgggcgcggtagctcacgcctgtaatcccggcactttgggaagctgaactgggggtgggtcacctgagaccaggagatgtagaccagcctggccaacatggtgaaaccctgtctctactaaaatacaaaaattagccaggcatggtggcgcgcacctgtaatcccagctactcaggaggctgaggcaggagaattgcttgaacccaggaggcagaggttgcaatgagccaagattgcaccactgcactccagcctgggggatagagtgagactccatccccaaaacaattttgccaaggaggattctatttgggccacctatgggcatgtgagatcagtaagatttggcagctaattatgcagagtgggtgatgaggtttagatgcctcccagggagagctctttttcacattttcttttccaattcttcttctttttttttttttttttgtttgagacagggtctcactcttcccaggctggagtgcagtggtgcaatcacatctcactgcagcctcagcctcctccggctcactagatcttcccacctcagcctcctgagtagctgggactacaggagcgcaccctttgcccagctaatttttctatttttctggagacgagattttgctatgttgcccaagctggtctcaaattcctgggctcaagtgatccacctgcctcagcctcccaaagttctggaattacaggtgtgagccacctcgtgcccagctgcttcttgctttctgaaattaaaatttaggccgggcacggtggctcacgcctgtaatactagcactttgggaggccaaggcgggtggatcacctgaggtaaggagttcaagaccagcctggccaacatggggaaaccccgtctctactgaaaataaaaatatcagctgggcgtggtcgcgggcacctgtaatcccagctacttgggaggctgagtgacgagaatcgcttgaacccgggaggcggacgttgtagtgagccaagatcgcgccactgcactcctgcctgggcgacaagagcgagactccatctcacaaaaaaaaaaaaaaaaaaaagaaattaaaatttagtggctgggcatggtggcttagacctgtaatcccagcactttgggaggctgaggcaagaggatcacttgagcccaggttggagaccagcctgggcaatatagtgcgacttcatctctataaaataaaataaaattaattaattaaaaattttatttatttatttatttattttgagacagagtctcgctgtgttgtccaggctggagtgcagtggcatgacctcagctcactgcagcctctggctcacgggttcaagcgattcttatgcctcagcctcctgagtagttgggattacaggtgtgtgccaccatgcctggctaatttttggggcgtttgtttgtttttgagatggagtcccagtctgtcacccagactggagtgcagtggcacaatatctcagctcactgcaacctctgcctcccgggttcaagagagtctcctgcctcagcctcctgagtaggcgggattacaggagcctgccaccatgcccagcccagctaattttatttatttatttattttttgagacagagtttcactcttgttgcctaggctggagcgcaatggcgcagtctcggctcaccacaacctctgcctcctgagttcaagtgattctcctgcttcagccttccaagtagctgggattacaggcatgcaccaccactaattacagaaatgcaccatcaggctaattttgtatttttagtagaggcagggtctctccatgttggtcaggctggtctcgaactcctgacctcaggtgatccgcccacctcggcctctcaaagtgctggaattacaggcgtgagccacagtgcccggccaacacccggctaatttttgtatttcttagtacagacagggtttcaccgtgttgaccaggttggtctcaaactcctgacctcaggtgatccgcctgcctcggcctcccaaagttctgggtttacaggcgggagccactgtgcccagcctatgttcatgtcttctatagccatctttattccttcctccctctttgtgacctgtttgtctgcatcagtgtttcatttggggccatcaggagacgtttggcaattcatggagactttaaaaaaaaactgtattgagatgcaattcacattcaccaattcactgttcaccagtggtgacatttttggctgtcacaacttgaagatgggatgctactggcatctattaataggaggcagaggctaggatgctgctcaaaccctacacctatgcgttggacagcccccacaacatagcagataattatccagccccaaatgtcaatagtgtccagactgagtagccctggttcacatccttggtctatctgcagggtcctgtcttgcaaggggctcacagttcaggtgcagagacaggaagagcctaataagaaaaaggacaagttagtccaggcacagtggctcacgcctgtaatcccaccactttgggaggctgagatgggggggatcacttgcggtcaggagttcgagaccagcctgaccaacatggtgaaaccccgtctctactaaaaatacaaaaagtagctgggcatggtggtgtgtgtctgtagtcgcagcttctcgggagactgaggcacaagaatctcttttttttttttttttttttttgagacggagtctcgctctgtcgcccaggctggagtgcagtggcgtggtctcggctcactgcaagctccgcctcccgggttcacgccattctcctgcctcagcctcccgagtagctgggactacaggcgactgccaccacgcccggctaattttttgtatttttaatagagatggggtttcaccttgttagccaggatggtctcgatctcctgacctcgtgatccgcctgccttggcctcccaaagtgctggtattacaggcgtgagccaccacgcccggccacacaagaatctcttgaacctgggaggcggaggttgcagtgagccgaggtggcaccactgcactccggcctgggtgacagagtgagactctgtctccaaaaaaggaaaaaaaagaaacaggacaatttcaatcacctcccttctgtgcctggccccagggtcttgggtacccaacacttgtcactcagctcagttagtcctcactaggtttagagaggagaggaccaagccacagggagtggtgcagctgctaaaacctaggtcctcctctctcaggtctgcacccacaaggccagcatttccctatacacattcaacatcatagcatagcgcttcatatgtcccagacatgtgccaaacatggtaggttagttaggtaatttagtccccatgcccgccctgtgagttagggctctgttttacagatggggaaacagaggcacagattagtcaagccatttaccccaggtcacacagcaatactaacaataagagcagttcactattatggagaacctagaatgtgccaggccctgtctggcaggagcctgttgaatcctgataacagcataggcagcaattggggctatttttccatacaatggaagagaaaactgtctcttactgatgtcacacagctaaaccggcctgggatctccactcttcattcattttgttttttgtttgtttgtttttttcgagatgagtcttgctctgtcgcccaggctggagtgcagtggcgagatctccgcttactgcaacccctgcctccctggtgcaagcgattctcctgcctcagcctcatgagtagctgggattacaggcacgtgccaccatgcccagctaatttttgtattcttagtagagacggggtttcaccatgttgatcaggctggtcttgaactcttgatctcgtgatccacctgctttggcctcccaaagtgctgggattacaggcgtgagccaccgcgcccagccaatgtttgtttgtttttgagatagagtattgctctgttgcccaggctggagtacagtggcacaatctctgctcactgcaacctctgcctcccaggttcaagtgattctcatgcctcaggctccccaagtagctgggattacaggcacgcaccaccacgtccggctgatttttgtattttagtacagacggggttttactatgttggccaggctgctctcgaactcctgacctctagtgatcctccagcctcagcccctaaagtgctaggattataggcatgcgccgccatgcccagctcattcatgaattctcattggtctctatggcaggcagtttctgggggctggagatccagcagtgggaaaagcaaggtggccaccttgaaactcacggagggaaaggagatacaggcagatacagggaaccgaaagtgcaagagcccaagaagggattgccaggcatcgcgcctgaggatcagcgaggaggcctgtgtggctggggtggggagagcaagcgtggtacaccacgagggtgccggcaggatccagagctaagacagaagccacaagagggctccgagcagaggagggatatgatctgactcaggcattaacagggtgttggggtgcagacggcggggggtgaaggtggaagccagggacccagtgaggagttgactacagtactccaggcaggaagtgtctgtggctgcagcaggatgctggcagtggaggaggtgagaagtgttaggttgtgaataaataaatatgtgtgtgtgtgtatatatagatatataatttttttttttttttttttttgagacagagtcttgctctgtcgcccaggctggagtactgtggcacaatctcggctcactgcaacctctgcttcccaagttcaagtgactctcctgcctcggcctcctgagtagctgggattacaggtgcccgccacgatgcttggctaatttttgtatttttcgtagagacggggtttcaccatgttggccaggctggtctcgaactcctgacctcaagtgatctgcccacctcggcctcccaaagtgctgggattacaggtgtgagccactgctcccagccttatacaatttttttctcagcctttctttgtcttttatgactttaatatttttgaagagcccaggttagttgtgctgtttttgtttttgttttttctaagacaaagtctcactcttgcccaggcgtggagtgcagtggcgcgatcatagctcactgcagcttcaaccttccagggctccagtgattctcttacctcagtcttctgagtagctgggacttccacgagtacattgtcaagcctggctaatgttttttatttttagtagagacgaggtcttaccatgttgcccaggctgctcttgaactcctgaacgcaagcaatcctctcaccttggcctcctgaggtgctgggattataggcatgagccaccatgcctatccctgttgtccttgtttggcccagaggctggaagatcacttgaggccagaagttcaagaccagcctcggcaacatagtgagaccctgtctctttaaaatttaaaaaaaaaagaaaaggaatagcacagaagtggtgccctgccttcttagtgtcccattcctggagatgttggctttgatcactaagttaagggggtgcataccaggttcctccagtataaatttgtgtttgccctttacagtgaatgaatatcttataagtctgttaagactatgtagataccttatacttcatcaaactcccatccatgcttttttttttttttcttttttttgacacagagtctcactctgtcgcccaggctagagtgctgtggtgcgatctctgctcactgcagcctccgccttttgggttcaaatgattctcctgccttaacctcccgagtagctgggactacaggcgcatgacaccacacccggctaatttttgtatttttggtagaggcggggtttcgccatgttgaccaggctggtctcgaattcctgacctcaagtgattcgcccaccttggcctcccaaagtgttgggattacaggtgtgagccaccgcacccggccctatccacacatttttgcatctattccttttatatttatttacttgccagtctacagtaaggattatattttccttctcttccttatttattcatttatttattattggtatggattctggatttctgttttatccagtgggttataatctgtaactatcattattgtattgttcaaataattccagatttggccactgggagccctttcaagctagctcatgtgtgagtgggaatctatctagaagatagaatttcctgatggattgggtgggttgtgtgtgagagaaagctggggtttattcttttttttagagacagtgtctcactctgtcacccaagctggagtgcagttgcacaattacagctcactgcagcctccatctcctgggctcaactaatccttctccctcagcctcctgagtagcccagctaatgtaaaatatatatatatatttttagaaatggggtctcgctatattgcccaggctggtctcaaactcccagcttcaaagtgatcctcctgccttggcctcccaaagggctgggattacaggcatgagccaccatgcctggccaggttcatcttttggcaaatatttattgcctataagttgagataaaaacattataaaagcagacaaaggtccttgccttcacggggctcatgtttttgtgcatgtgacacttttgtttctgatccaagccattgggggacgatggcacagattttaggagggtggatcagtctggggcaggtgcagtggagctgcctggtagaccagcctctgcttccactcctccctcctccattagccccatgcttaccatgtaatgacttcctgctctttttcttcactcaacagccaagacaatgcaaactccagtgaacattcccgtgcctgtgctccggctgccccggggccctgatggcttcagccgtggctttgcccctgatggacgcagagcccccttgaggccagaggttcctgaaatccaggagtgtcccatagctcaagaatccctggaatcccaggagcagcgggcacgagccgcccttcgggagcgttacctccgcagcctgctggccatggtgggtcatcaggtgagcttcacgttgcacgagggtgtgcgtgtggccgcccactttggagccaccgacctggatgtggccaacttctacgtgtcacagctgcagactcccataggtgtgcaagcagaggcgctgctccgatgtagtgacattatttcatataccttcaagccataaagatattgtgttcacttttctgcttgaggctaaggcactgtatcccaggcctcccaatgttcccgagccaggaactctgggccccatggagttatgagctcccttggaattttgagccaagctttaagcaagtctggactcctgagacctcctgggtctagtcagtaaaattctgcaactctaggaattctaagatcccattggaaggaatgctctacctcacagaactctgaaccctacagaaatatgggcctgctgccatttcctgaagaccggggcatcggggtggggtgataaaggatacaacctgcacagggggaagttattaaagaggctgcaaagtccagccaccctgaagatactccccagtgctcccctcctgctaaagaaccagttaccccaggaaaattcgactcctgtttttctttaattaactataccgacggggatggagtcatctttaggggctggtagggtggttatccaagggctgaatccagtggagctgggccaagtacgacaggagtccagataaaggtgtaggggctgcacggccgcaagtctcctggaaaggctggagtgaccggcatgccgggattgggagattaggatttgatttcattttggggcgggcggtggctcgtgctgggtcacgtggtcgtgcccaagcgctcctcctgttgccccacctgtggttgctgtggactgcacacgacagcagattcgctgtcccctcgttggaggcgaatggtcggaccccgagtggcggcgcccctgataaaaggccgaggattcgcgatcagggtgcaacttcactccctcctcttttctctccagccttgcagcgtggccgttcacatcacgcgcttcactaagcctcctatcactagtaacctttcagcgcattgtttaaaaagaaagcagtttctgtccctttctgtagttcctttaagttcaggatgtaagcgaagccttccattaagtaaaggtgagtgtcgtttcgtctcagtcgcg

SEQ ID NO: 6 - DNA, 1087 bp, Homo sapiens
tcatgtgacaaagcgcaggacccctcactgccccaactgcttgctgttctctctttcttgggctctaaggacccaggagtctgggtgcacagcctccttctctctgagattcaagagtctgatcagcagcctcttcctcctccaggacccagaagccctgagcttatccccatggagctctgccggtccctggccctgctggggggctccctgggcctgatgttctgcctgattgctttgagcaccgatttctggtttgaggctgtgggtcccacccactcagctcactcgggcctctggccaacagggcatggggacatcatatcaggtaaggggaatgggtgtcctacagaggggttgccagcggggatgggtgctcagtggtcttctcccgatcaggctacatccacgtgacgcagaccttcagcattatggctgttctgtgggccctggtgtccgtgagcttcctggtcctgtcctgcttcccctcactgttccccccaggccacggcccgcttgtctcaaccaccgcagcctttgctgcaggtaaggactctggactggactggggcatcgcgagccagcgaattcctgccgaggagctgagccatctctcttgtccttgtccccagccatctccatggtggtggccatggcggtgtacaccagcgagcggtgggaccagcctccacacccccagatccagaccttcttctcctggtccttctacctgggctgggtctcagctatcctcttgctctgtacaggtgactatcctgcccactgccctggggagctttgggagggtccagttggggtccctgaggacagagggcaggggcaagtgcttaaactctttctggctccccaggtgccctgagcctgggtgctcactgtggcggtccccgtcctggctatgaaaccttgtgagcagaaggcaagagcggcaagatgagttttgagcgttgtattccaaaggcctcatctggagcctcgggaaagtctggtcccacatctgcccgcccttccagcccttccccagcccctcctcttgtttcttcattcattcaacaaaatttggctggaa

SEQ ID NO: 7 - DNA, 48927 bp, Homo sapiens
gggggcacgtctcggcgagtcacgatgatggcggccaccatcctgtggtgagctagcggattccctgcttgtctcgccgaccccctcgcgccttctgcagactccgtggctggcgctcggcgcgtgaggaagcacggcggcccgagttcgcggggaaggccgcagtcgcggaggcagcggcgcggtccggggcacgggctgggggagaggccgctccgctgggcgaatgtgacaagcccccacccccaccgccttcctccccagagcgcgaggagcgcgggcgaccccggggccccgccaggccacagaccccgcccagcggccagcacccggcgcaggcccggcagccgagctgcgcggcggcaccatgcaggtcaccctgaagaccctccagcagcagaccttcaagatagacattgaccccgaggagacggtatgcgcgcgggccgggggcaggggcagccgcgtgcgggccgcggggagcgccaggagctcgtggggccgggcggcgcgctccagcgggggaagccccggagggcgcgatgagggccctgggtcctggtgccggccctggcggcgtacagcggagccgatcctcctgtcttggccgtgggctttgtggcaggagaatggggaagcagtggccggacgccgaaggcctggtggcagatggcgtggagcgcacgcccgcgggcctgggcctaggagctcgtgctagcggggccggagggggatgggaaggtccaggccgtctcagccgtagagcctggctttctggtatgggtgcacaggtgggggagggagacgtaggcgtcgccactacccctgtgtggacctggttagccgcttagttcccagagttggtaacccgagaagatgagccttaagaaaaaaaaaagtatcaggttccgtttgccgccgagaggtgagtggtggtgaaaatgaatttgcccctttcccctcagaattgtttacccttttatttgcaaatgaatcgttctgctgccttcctcccgccaccaaacccacacccttgcgtagattgcactttgaggcctctttggtgatggttttagctgttagagctcttcacagccatccaggctcaaactaaacttcagatttaacgggttttctgtgttagaaatcttggaattgtaggagttggaacgctgcagccaccctcccccgatgccccaaacagtagcagttcaagggggaaaaaagaaaaaaaaaacaaaaaacaacaactttgaatcctttctgcagttaaagccttaaacatttcagaagtccacattatacatttttctgtatttgtgactgcataaagagacactgttgaggtcagtacaactttatgccaagaatctaaaaacgctgtgagtgtaaatttactgcttatgttcggaaatacaccgccaagattgtcataatactaagtttaaaccagcagctttctgcccaactctatttttaaaagtagttgattctattttgggtggagatcaggggctttggtgttaagtagacctgagttccatttgtggttttgtaacttatttgctatgaccttgggcaaattacggttagtttcattctctgtataatagggataatacctgccttgcagagatgtgaagattagatggtatgtatttacttggtggtcagtaaatggaatcgattatttaaacaatggattcctttgagtggagatacagtgttacgttttacttatctcatttaatcttaagttttgtacatctttaattttttaagaaacagcctttttgggattttggtacaaaattatttgatttcagaatatttatatgtgggtgtatgctgtgtgattaacttcttaaaagtacaggagatctcagttatacatgagaaacttttcagtgtcctcagaagtaattgacaataccctgtggactgacagtactaatagaatctaatttctcttgaatatttctttactgcttaatgtgcattaataagttgaagggtgaaagttaaaatggagtttgtttgatgatttcagacaaactacgtaaaatgcctatttgactttggttctttgtggtaacaaatgttggtgccccagtaacttaatcggcttataatactcagttaatttcagaattattgaaagctaaagaaatattgtggctttttggtaaatatgtgtgggtgtattgaagttatgcagtgactctgtcaacagctccactgaagtatttacgttctgtaagatttgtttagcgttttaggcactttacgcatactgttaactgagagtcaatgctgtacctgtgtttgtgtgaattcttaactatttttgctgttttccagtttatttccaaggaaaagtaatatgttatacgtctggaagtatatttttgaaaagcccattgttagggagcggtttctacagctttcgctgctatttatataaatataattttgttgctgttagtataaaaaaactaatactgttagtccggggcaagaaattaaagcatttcctctgggatatatggaacgtttgcatttaatgacttgtcagtttttattttaatgactttaggaaatatttttcatgacaactgtttcaattctatgtttgtagtgggttttaattagtatgtgtttttgatacgacaccttagaattccagtaagaaaataaacaatgaaaattatgttttctagggcaacgctaagtgtcctgtttctaagttgttgtgagaacgaggtaaccaaggatattagaaatagatctaaaataagataggatcttattgagacctgtttttggtctggtcacagatttgtccttgtttaatttttacctagaaggaaccaaggaaattaagtaacttacgtagccagtatagcaactcttgtgagcttgagatgagcatgagcaaaaatggaagaaaggactgtgagataagtggaatcatgggaatgattcatttgttgaacaagtaaatgtttagtgagctttgctggcaggactggaggagtacagggacctgtagaacgtggtctggggcttctgggagccttattgacttagtcaaagctcattggctatagagtagggggatatacaaaatggaaagagcaagataatttgttttaaggtgtttttatttgccctagttttaacaaaactttcttagacttattaggcattttgtaccatttacttgactattactgtgatacattacatgaccactgcctttagtgttaatctttgcaaagatctttttgtttctacaattgtaatgcaagccttcttataaaatattcaaacaatatagaaacaaaatgagaaggtggtatgtgtggggtagggagaccattgctaggagattttcttcattatgtgctttttttgttttttactgtaaaaattgtgggagacttttaagtagcctacatattaaagcattttgagatgtgtgatagagcactgcttctctgaaattcttaaaaattctgaagtttaggctgggtgtggtggctcatgcctgtaatcccagcactttgggaggccgaggtgggcggatcacaaggtcaggagatcgagaccatcctggttaacacggtgaaaccccgtctctactaaaaaaaatacaaaaaattagacggacgtggtggcatgcacctgtagtcccagctacttgggaggctgaggcaggagaatcgcttgaacccaggaggcagaggttgcagtgagctgagatcactccattgcactccagcctgggcgacaaagcgagactccgtctcaaaaaaaaaaaaaaaaaattctgaagtttaatggtgtgatggacatttagagggaaatggaatacagtttttaagctcagttttatagtcaattagtgttttatattactgttgcttaaaaacattaagaaaggtagatttaggaataaaccttttgagataaaaaaaatacagtgcagtattttattgcatcactgaaatggtgacaagaaaaagtatgtgatatacaaattaatcctgcagtctaactcttgacactgtttgccttgaacaactaaaaacaaaactcagtaaatttgagatgagactttaaatgcaaaagctgaaatgtgattggattagtatataagtgacattaaaattctacatatacattggatgtttttgctaagagaattgcaaagacatcagttttaatatctataaatagcatattagtgtgctgtgaagaattacctaatttcgtggtttacctctataatgtgattgttataaaatactgctttacccagcaccttgggaagccgaggcgggtggatcacctgaggtcaggagttccagaccagcctgaccaacatggtgaaacctggtctctactaaaaatagaaaattagctgggcatggtggtgcatgcctgtaatcccagccacttaggaggctgaggcaggagagtcgcttgaacctgggaggaggaggttgcagtgagctgagatcgcaccattgcactccagcctgggtaacaagagcgaaactccatctcaaaaaaaaaaaaaaaacaaaaaaactgtgtgtgtatattgctttagtacttgctctgtattatacagtatttactagccatcatttattagtgaagtattcctgtggtggtttattgtattttcaatatagtcatgctagatacaatttcatattatacaagcttcctagattaaggtaatgagtagtaaatgtattaaaaatactatatcacagaggtgaaattaagagttcttggcatattggcagaacaagatacaggaagaaactgagaaatctggtacatttttgccagacttttgctgttttgatgccgtgcacacagtaggcatttagtaaagatctttgaatgaactgaatatattcttttggtgaactggcaaagcagtgatcccccaacgtagtgtgtttgcatgttgatttatttatttaataaatatttgctgtgtacttactagatgtcaggccctgctgtgatggtatgtgcattctagtgggataaaactgtcaaaaaatacattttaaaaaccaggtaatggtaagtgctatgcagaaagttgaaataggataaagtatttgataatacttcactgggtggctacatttttgttgttgttttgttttgtttttgagatgcagtcttactctgtagcccaagctggagtgcagtggcgccatcttggctcactgcagccttcgcctctggggctcaagcgattctcctgcctcagcctcccaagtagctgggactagaggtgtgccccaccacacctggttaatttttttgtatttttagtagagacagggtttcatcatgttgccctgggtggtcttgaactcctgagctcaggagatctgggtggctacttttaaatttactagtcactgaaggcctttctgaataaggtgacatttaagctgagagctgagtaaaaatgagcactcgagaatgaagagaatgttttctatagggaactgctagagcaaagacctttaagaatgtgttttgggtactgaaaaaaagcctgcattgctaaggtgatgggtaagagataagggtgagttgggtaagagataagagagtgagttaggcaagtgagttaggctaggggttttcagggtaaacttggaaacatttacaagcaggacagaaatctttgtttctttgtctctgtctctcttttctctttttccctcccttcctctctcccttcctccctcccttcttcccttcctccctcccttcctccctcctttcctcccttcttccctccctccctcccttcccccttccctctcctttcctctccttccctcctttcctcccttccttccccactcctttcccttccttccttcccttcctttttcaacaaggtcttgctctgtcacccaggatagagtacagtggcatgatcatagctcactgcagccccaaactcctgggctcaagtgatcctccaccctaagcctccccagtagctgggactacgggggcatgccaccacgcccagctaattttagtttttttttgtagggatggggtcttgatgttttatccaggctggtctccaacttctagcctcaagtgatcctcctgcctcagcctcctaaagtgctgggatgacaggcatgagccagcacacctagccaagaaatatttcttgtaggatttttaaaggttactttgatgctgtggggtgggcaagagtgaaaagcagagacatcagttagggggcttgtgcagtagttttaagtaattgcagcttgaaccagggcagtaggagtggagatgtagagaagtagatggaattaggatatgttttgagaggtacagttggctgtaccacttgctgtgtcacctcaggcaagttactcagtatgtgccttttggtcctctgctgtaaaatgagaatactagtatgaaagtactaacttattggtatatgggttttgaaataatattaacagtgcttggcaatgtggtaccactctccctccattgttcttgcttagaaagcctcaaatgtgattaaattcaactcagtgtttgtacttgcacctgagtggccagagatgcaccttgtagccacattgacttgtcttgcttaaatttatgaacattaaggaacttaagttcatgagcactaaggaacattaaggcacactaaggaaccttaattgggtccttagtatgcagcacctgacagtcttacagtttactagtccagtcactcttccactgccacaggatgctttcatatcatctagcctgcttattttcacttgatgaccctagtctttatttgattgagaatttggaaataatcgagacagaatgtctacaaggtcctaccgtagctacctacctgctagcctcttcttactgtagatagttctgaattgtgggcggtgctatctaaggcaggtccttccacttttccactgtacctcatcccctgtcatgtgtgaaggacatcactccatcagatcttttctcttcatcactgatttttcccatttctagggtatacaaacatttttccccatcttaatgatacactcccttgtgtccacatccctctttagctgctgccctatttccctgcttctcaagaaaattcaggagtatctcttaattctgtttacttttttccacatcttgctcttttcagatccaccatactgttcctaaaagggagtcctcacaactttgtacttgtgctttgtccttaagcacaatacttttaaaaaagtctttctcctctttattaaaatgagagtaataataattgaactgctttcctaacagttgtgaaaatcaggtgagatcatgggcatggaaatatttagtgaattgtgaaattagaaataaattttgcagtttttaaacaaatcctgctttcatcagtttttatttcgatcatttcactattctttctttaaaaggtttgtatgaatgagatattctcattttcttagattgacataatcagcaattttgaacagtgtgtaaaatcaatgaacaaggtcctgccgcgatagatgccgtataggattccagttaatttctgaaagaaatttgctaaatttaaccctactgtggcacagtgaatcgtacgaaggacactacaccatctgttccctgtaagtttagataaataaatgttttttatagtgtcacgaaagctaattttacaactgaatgagctttataaaacttgtaaacattgtataaacttatttcgaggaggtagaccagctacaaatgactgacaatacatgaacagattctggaggcttaaacaggtagataaagttgttctcaccaattattccccacacacttctggttgaattaggtaggcaccttgtttttgctagtgcactggcgagatccattctttgcctatatagaaacttacaggtatcttgggaattctgcttactcagttttcaaattcctgtgtttcttttggtcttgttgaaatcatactgttaggaatatattttataatagattaaattggcatgaattggttggcttaatttctgtgggacaaatgggttttggatttcaaatcatatatttaaaataatagccttttggatcataaccccagtttgaggattgcctttgttatagtgcctgcctcttctcacataattaatgttatgctatcagttattgtttcaattgtaaaaatctcctgtactaaattattttattccttgggtccagtgaggagatttttcctatttgtactgaagtcagctgacatttttaaaatcaaatttgtatttgtagaaatatcaggaacctaccttgggacagaaattccccaggaaatactctggtgcctgtaccagtttctcaagtggaaggagaagaaccgaagaaccaaaaaagaaaaagcattacctgtagtgtaaacataagaaatcctttagtacacatttggctttgggaatctcctttattttgctaattgttgattgccaaaatttaattgctgctattattttttaattaggccgtgtagtattagaactgccttagacctttttcttttaaatgaaatctctttttctctttgaaagtccagttttccctaaattactcaagtaattcaggctcattatagtaaataaagtatagtaaaatgagaatggcttttgccatcggtctaaggaaccactgtagactctgtatatccctctagtcttttcaaaaaatacatttacacataatacatgaacacaactacactatttgtttaaaaaaattaattagcaactagctttttttcctcaaacatagttataaatattcatttatattgcataatgttcaaatgaatttatgtacattaatttattttaccatttctcctttgtggatgtttagggtggttttcagtttttagtattgcaaaaagcaatgtagtgcacatactttgtacctttgtctttgaagtagttacatgagcacctctagcattgatttctagatgcgaaattatttggtcaaagtgtggcagattgcctttaaaaatgcctggtcaggctgagcgccgtggcttatgcctgtaatcccagcactttgggaggctgaggtgggcggatcacgaggtcaggagttcgagaccctcctggccaatgtgatgaaaccctgtctctactaaaaatacaaaaaattagctaggtgtggtggcgtgcacctgtagtctcagctacttgggaggctgaggcaggagaatcgcttgaactcgtgaggtggaggttgcagtgagccaagatcgtgccactacactccagcctggtgacagagcgagactctgtcaaaaaaaaaaaaaaaaaaaaaagcctggtcagtacttacacacattaacaatacttgttatttacaaataccatctcccatatgagtagccaggattcaaatttagagactctgcctctagagcctgtatgtttaacctttttatttcatctgccttagtgtccccattagaaaaagaggataatagtatctacctgtgtactagttaacctattactgcataacaaattaccccaaaacttaattagaacagtaaacacttactatttcataatttctgtgagtcagaaattcagggatattttagctgtgtggttcttactcaagagtctcaggaagttggatttaaggacttcattctatgcattaaaggcttgactggctggagggttcccactgaaagtgacttcctcacatggctaacagcttggtgatggttattgactggaggcctcagatcctccccatatgtcctcatgacattgtggctggcttctcccagtgttagtgatccaagagagcaaaatagaaacgatggcttttatatataaaccagcctcagaagtcacacttttacttcagcagtatcttactgttcttgtggactagccataatttagtatgtgaagggtatgtaccaaaggcttgaataccaagagatgggagtcattgggggccatcttgggtgttggctactacaacctcatagagatgtagtacagattaaaagagttaattattgtgaggctcttagtacactgcctggcatatggcaagtacatagcctgcattagcttttattcagatgttatatttcagggctacccattaaaactttacacaattatttatactgtatatagttacaacagtaataaggaacaacatagttacaaaagtaagaagaaaaaataatactgtaacagtgagcacgctgttatatggaatatgcaattgctgacctaattaacaagcagtagcctagaaatcttatgcaaagtgctgtgtaagaagattgacatggcagctcattatactatcataggaatatgatttacaagatattattttgatgtctcatgcatgacctaaatttgtcgaatgaaaaatgactgcttttttaaagagacagagtcttgctctgttgctcaggctggagtacgctgacaagattatagctcactccaaccttgaactcctgggctcagtcaatcctttcacgtcagcctcctgaggtaactgggactacaagcgggcaccacagcacccgtctaattaaaaaaatttttttggagatggtggctcactatgttgaccaggctgacctcaaactattgggataacaggggaaatgactacttttaatggttgttggcctgaactagaatagtgccagtgccacagagatgcacggtagtgctcacattagggaataattagatggtaagtttagctttgtggcggcacttttaaatacactttatgattgtcttcctttggaggaaaaaagaaaaaccatgcccatcatgtttaatattatgttgagtacgtttttatttttaaatgcacgattttttaagagagaattaagtagctagaaaaaatgtttgatttcttgaatgttaaccatgtctttgtctctagtggaattgatgataaaccaccattatttatgtagtgggaaatgcagcacaatgaaagttctagccttggttatgtactgggactgtggtgctcaggtttatattcactctgttgagatggcttactggaatgggagcattggtgtggggctcagcgcagttaaaggagtcataattgcatctgttggtgggccatatcctttccaagagaaaccttgtgctgagttcatacctcttcctttgaagcatccagaaagaaggcagtctttcttgctaatctgttttgaagtatgctcaattaggttggattagggatgatttaaacaaagtaatttagacacagttcttctacagatacattatggtttaaatacctctaggacatcccgtgaaggtgttcagtagagagttaagtgtgcataaatgaaggtcagggagagagagctgggctagaaatacagatgacatctgcatggttattgaaactaggagtagacacgatggattatcctggaagtctaagtagcacttaaagggctggccagggaggaggatttcgtgaagcagtgaatggagagataggaaaaccaaaagtgtggcatcctggaagccaagagatggcagtatgtaaaggagggacaggtcagtactgtcacacgtgacaagaggaagataggagaggattaagaagtgtggtatcattatggtgttgcagaattcagtgatgttggtaaagagcagtgttaatggaatggccagcggtgggtggggggggactaccagagaaaataagcagcagaatgagaataaatttcatgtttttgtttatcagcacagtattgctctcttttgagtagttggtttgggattatgaataagtgaggacagtggtgtgtatttaagtttttgaagaattagattgtggggggagagagtctaggaggagacgtgattgttaagtgtttgtttttaaaatgatgaagtattaggtctaagtgtgaatgaaagtgaactgagtgagagagaggctgaaaaagctgggggagataggaaatataatgaatttagtaagatactgaaaaatacttggaggcgaaccagaggacaggtggaaataattaggtttgaaagaaagggatacttttttcatttaataggtgagaaggagatgtaggtgggtctggatgcaacaaagttagacaaagatgaaaataagttcctctgtcttctgtttttaataaggtagaaagtggtcacctgcagacagtacgagaggatgctgtgaatcagatttagagtagaatgcagatttgagatattcttttggaggatggagaagagggctaactagggggaacagaagatttagtgtatccttttctccactagcatttagaaaacggtataaatgtagataggcagtctcttaggtaaaagttgagatttgttagctaagcaaggttaggacaatgagacaccacagagtggttggagtaaattttagaggttgagtactgacaaataaatggtgttggtccaaatacagaattttgtgtgttaggagcagcagaaagacaaggaagtttttgatattagaaagaaggtgataggagcaatgatagtgaagattgaaatgaaagtagagactctagggaccaagtcttaaggagattcaagagcaagtatagtgaacagttaactaagagctggtaggaacaggagattggtcacttataattttaaacatggagtggtttttagatgacaaaattcagcctgtagggttctgtaagtatagattggattgtaagtaaagatcactgttttgttcaaggtaaggaacaatgccagaattttagacaggtcagtgcacctggttccaaagtctggttcagttattttctttgaagtgatactgttgggtcaaatccccgtgccttcccccaccaccttaaaaatgttgaagcatcttggcatgttgccctcaaaaattttgatcatttgatactttaattcttattctgagaatgtatttcttcactttcaatgccaagaattattcaaaacaatctttccagtgtgatagtctattggattaataacatgaggcatcaaaatttatgtctttggttactaatgaggttgagcttttctgtgctgtgactgtgtaattgtgaattgcctgcccaatcatttgtccaatttttttattagtgcaaaaacagttttgtgccttgtctctctctctttttttttttctttttcttgagacagtctcattctgtcacccaggctagagtgcagtggcatgatcttgactcactgcagcctcagcctcccgagtagctgggattacaggcgtgcaccaccatgcccagttaatttttgtatttttagtagagatggagttttgccatgttgaccaggctggccttgagctcctggcctcaaatgatccgcccacttcggccttccagggtgttgggattacaggcgtgagccatggcacccagctgccttttctctttttttaattgcttttttttttttttttgagatgcagtattgctctgtcgccaggctggagtgcagtggcacaatttcggctcactgcaacctccagctccctggttcatttggttcccctgcctcagcctcccgagtagctgggactacaagtgtgcaccaccatgcccggctaatttttttatttcagtagagacggggtttcaccatgttggccaggatgatcgtgatctcttaaccttgtgatctgcccgccttggcctcccaaagtgctgggattacaggcatgagccactgcgcctggcctcttaatttcttttttttttaatttttatttgtcctttttttctgtttgagttgcatgtttagcctgttaatttttcttctttattgaataaacatttttagtgtttagtctacaattacttctttagccaaatcatataggtatcttgtgttgagctcccattgttatgttcttaatattctgtgtttgttttgttttgtttttgagacagaatcttgctcttgtcatccaggctggagtgcaatggtatgatcttggctcactgcaacctctgcctcctgggattcaagcagttctcctgcctcagcctccgaagtagctgggattacaggtgccagccaccatgcccggctaatttttgtatttttagtagagatggggtttcaccatgttggccaggctggtctcgaatccaaccttaggtgatccgtctgccttggcctcccaaagtatgggattacaggcgtgaaccactgtgcccagccttaatattttttaatcaattttgatttctttgaagcaaaagttatttagtagtaaattactaaagggccttttttttttttttggtccagcttttcttaatttatggggcttttttttcctttggtcctccctcatttttgatataaagctagagagtcccgttacttatttaagcgttttgaaatatgaaatatttaagtctgtcttatacttcattgtaacctgtcaagaatgagatattcctgcatgtttattttcttttatttgttgcttcatatgtgtctttttttcttcacatatgtctatgctctgttcatttattcatccagcacaggataatggagcacccactccatgccaagccactatgtattgttctgagaactgggtttatgcatagagatacacttggtctgtaatttatttgtagttttcctaaataatcacacttgcaaatattgtatccttttgtccctctacaaacaaagtttgagaagaaatttaccatacaccactgagtgctccacccatgctctgccatcagttggttgacttggcaagtctcttagcatgtaggatagcagtcttcaaatgacttggtttcaagacttgtttacatttaaataagttattgagggctccaaaataacttttgtcgatatgcttacgttttattttatttatttattttttaaggcagattctcactctgtcacccaggctggagtgcagtggtatgatcttggcccactgcaacctccacttttcaaatgattcttgtacctcgtcctcccaagtagctgggattacaggcatttaccgccatgcttggctaattttttttttttttttttttttttttttgcatttttagtagagacagggttttaccatgttagccaggctgacctcgaactcctggcctcaggtgatcctcccactgcagcctcccaaagtgctgggattacaggcatcagccactgcgcctgacccaatgtacttacatttattaatgtttaccacattagaaattaaaacaaactttattaatgttcatttaaaaataaatataaacttattataataaatattatacttactttttttgcaaaaaataactatctgccaaaacaacagtaacaccaaagcactgaaaagactgacactgttttacttttttttttgcaaatctgatgtttggctttaaaaaaattttacttgtgttttacctttgaaatggggaacagtggaaaatagtggattgagatttttgtgatggatttctactttggggaacatcagaatagcagtgatgctactgacccatttcaggaagatcagtgcagcaaggaaggtttatatggtatttgcaaaatactctgcttggagtcataaggggtggtaacctctttatttccgtctcctcatctataaaattgagtgggtgacatttccttttgtcccagagttttgaggattgtgtgaaattgtatgttaacatctgaagctaaataagctttttttatctttgaagtacacaccatcactttttaattgtacaaaagaaacctttatttgtatccctttctgtctaaaactcaagagaactgtcaacttagataattttcaagaagtattgaatttttctccttggtttttgtgcctttaaagtaatgaaagtagttctataaaggcaaatgggaaagccatctctgccttttttactcctgtacctccctacttaacaagttaagaagttcattagactcatttttgtaaatactgtataatgagcctaattgtcacacaattttaggaaatgaagagactataaaggtcatggattccagctcctcttacagatgaatgaagctgatgctgagagaagctaagctgcttgtttaagagcattgaagttgtctggaggttttcagcctgggctgaactttggaaacacctgtaaaactttttaaaaatactgatgtcaaggtcccactctcagagattatgttttaattggtgtttgtaaagtccccctggtgattgtaatgaaacataacacttaaaatgaatcatttgccttttaacattcacaatttaacctttaacattgaagtattcttattgttgatgagactgttttatttcttagattttttaggtgatcaagctttactttcttgctccgtgggaaataaacccatgaacagtatataaaccaaaactttgatgttgaaaactttattttaaattatcagttcaactagtaaatttttaaaaatctgtgtgtatcagatggtgttaaagtttatggctatcataactagtaatatgagttaatgttgaatcttttttgatataaattggaaaaacataatatttgaggttttggaaacattaataattatgtatataatttttgtcttccattatttattcagattctggattgtcattttttatttagactttttccaaaacaaatctttatttttcctataggtgaaagcactgaaagagaagattgaatctgaaaaggggaaagatgcctttccagtagcaggtcaaaaattaatttatgcaggtatgaattaaatattaaaattaacatgccatgtcttgatattcttttagttttagaaatgttatcttatatattgtagtatattcaaattgtcagaaaaatgattgtacaaataaaagcagtgaaagagcagtcatttgaatctaatattaatattcaatcttctctttattcacatttgccctgtgtatttttccatcaaatggtattagttttgttttatcttttgtaagcatcgtgtaactggcttttgtttttttaatcaaacggagcttttttttttaaattgaattgaaaccatttatactgattgtgttattattagtatgcttggaatcattcctgtaaaattattttaaccaaaactaactgaagagtacagaaaaaacacatcacacagacacctacaggaagaaaaaaaattaatattcagattatgtaaagaattcttagaaatcagtaaggaaaggatgaccaataaagcaacaaaggataagagtaggaattatacatttgactagcctcactaataaccaggaaaatgtatattaaaaatacatttgatatccaaatttttagagaaaatgctttcattgtagatgttagtaaggtgggtgtttgatcacccatggattcttctctttttctgaatagtgtttcctaaagtgagacagcctggaggaaatgctaacctggtgattcagtcccattatttttataggtcagaattcagaagcctaaagaagcggacataaaattcaaatttccagtttcttgttttggcctgttttctcattcctatccatattcctttctgacttaatgttagcagcttttgattcaatagctttttaaaggtggaaaactaaattcatgtagcaagaaacactagagagtcctagctacctaatagtgaccttcagcacgaccacagttttgtgtacttcgtgcatttctaagttctgtagcatcttgccctttcttgtgtatcatgtcgttttctgaagtacttttagtatcttgctttgatagtgttagaacatttctgatttatcagatatcagtattttggggagcaggaaatttgtttctctccctttcttcatatcataaaagaatataggttattttccagaggacccctgtgcaatcggagtattgaattttctttatcttcatgatctcctccttttcagggcctctttcatatttccttgcccagtaagtcttttatataatcaatacatttgtaaaaattgattgtcattctatatacactatataagtttgacatcttttagtcaaatgcttatgctttttagttttatttgtttgagagagggtcttgctctgtcacccaagctggagtgcagtggtgtgattatactcgctgtatccttgaactcctgagctcaggtgatcctcctgcctcagcctcccaagtagctaggaccataggcatgtgccacaatgcctggctaattttgaatttttttttttcataaacagggtcttgctatgttggccatgctggtttcaaactcctggcctcaagctatatttcctcctcagcctaccaaagtgttgggattacaggtgtgagccaccatgccctgccacttaggagttgttttatttttatcttgattgattggtttttctttgggaaaagtattaactgatagaatttatgttggtgattcatattttaatatttctgaaatattcatatttcgagtagaaagttgttttaactgaagtgtaagagaaagattatgccttaaatgatttttttttctcttaatgtattaggcaaaatcctcaatgatgatactgctctcaaagaatataaaattgatgagaaaaactttgtggtggttatggtgaccaaagtaagtttcaacctcattctgtatatctttatgcatgtaggtctttttaaaaatgatgatcacaagtccacacaatggacacagtttatacacatccatagtggtgtacacttaactactatgaaaggtttttaagaatttaccttaagtgaaacataaagttattaatgttttacattaattacacattaaactataatatagttttaataaaattttatgtaaattaaaacaattgaaaaataaaatgtcatgttaaaattatttttgctacagtagtgaaatcattatataattcttttaaaatgtctttataagtggaataaatgtttattctgtagtttttgtaagcttgccttaaatagacctgctaaattacgtactagtcctaacagattcctcaagacagaaaaggcatgaaagcttattattacagtgatagttcttagtgaaagaatatgtttttagaaactaaaaaaagggaaaagataactaaagaaatgatggaatgatttttatgaggaagttttttttgtttttgttttgtttttttttttttgagacggagtctcgctctgttgcccaggctggagcgcagtgacgctgtcttggctcactacaagctctgtctcccgggttcatgccattctcctgcctcagcctccctagtagctgggactacaggcgcatgccaccacgcccggctaatttttttgtatttttagtagagacagggtttcaccgtgttagccaggatggtctcgatttcctgacctcgtgatccgcccgcctcggcctcccaaagtgctgggattacaggcgtgagccaccgcgcccagcctggaagttttaaacagatacttttttgtgatttagtaggctggaatgtatttggaacaatttataaaattaaattttttttaaagcagagaatgaacatggatttttttaagagactatttatatacttgtttatttaaagatatataatgcagtgtagaattaagagacaaatggagaagtggtactcatgacattcatttttaggattggattgtcataatctgagaaagaacagtgttacttgtagcactgaaaatgagtttaaatcactaattgaaaccacttcatcaaaggccaaaagtggattaaatgtgggttttttctcaaagtcacaaaatagttaatagtaatagaaaatagagtcgaagaaataaattctaattaccacatgcttttgtactgggagcaagcagctaaatagtttacaagtgttgaacattttttaattcattaagaaccatgttgattttgctatacttaagaacttaagtcattatatgttaagtttaaaaacaagcagaatcgtgaggaaaccttgtatcatctaggtttttttattcaactgtggtaaaatataacaaacttccagtttaatcattttaagtgtacagttcaataacattatagttacattgttttgcagctatcaccatcatataagtggaatcctatggtatttgtctttttgtgactggcttatttcacttagcataatgtcattgaggttcatctgtctatgttatagcttgtgccagaatttgctgaacttttaagactgaatactatcctattttcctatctagttttagcatacatagtacataatgggaaatgtgatagccacacatttaaatatgttttgttactggtcttagtttcttttaatattacagtgatcctgactgtttagaacacaagaattaagcagaaaaagtctcaataggtgcgtgtgtttgaggaatagatacttgaagcctatcattatattgcatacagtccttttgtttttccttaaagtcttttattcctaatattacataggattctaatgatatttatgattgttttatttgaagttaatagaggacaactatgaaaagggagggaatgctgctacagtaaggcattatggaagcactgagaaatgaccttattaatacaaagaagggaaaggaaaaagctattaagatcaaaagcaagaataaaaactaaaaagcagagaagggcttggtactgtttagaataaagtataagtagctgttcttggcagtaggaaccttgaagggaagttacattgcaatattattttgataacaattaaggaaaatattaaatgagtataccacttttaaaaatacatttttatctagattggttattataaagttttggtgcttaagactctaaattttcacctttgtgaagctccagtttatccagaataactgaagatccagaatgatctcaggatttcagctcattttagttttagaacagtaataatctgcagaatattatattggctgttaagaaagttaagctaaataggaaaagaagggagtaatgctactagtattttttaaaaacctatcacctttcactaacctttttcctagtgtcttctttattagttcaaatcaaaaagacaaggcagctcattggttttagagtttgtttatgcctgtggcaaattatgttgaatttaagccttgtcttccactaaaacagctaccttttgtccttgggaaagttatgaactaaacaggtagcgagcattgagaggccttaggagaagactaaaaatcatgtatgatttttacacatgtacagttgacccttgaacaccactgagcttaggagtgctggcctctcccctacagtcagaaatctgcatataccttttgacttgcccaaaacttacctactaatagcctactcttgaccagaagccttactgataacgtaaacagtggattaatacatgttttatatgttacatgtatgatatactgtattaaagtaagctagagaaactattaagaaaatcatggccaggtgtggtggctgatgcctgtaatcccatcgccttgggaggccaaggtgggcggatcgcttgagctcaggtgttggagacctgtctgggtaacatggcgaaaccttgtctctacaaaaaaaaaaaatacaaaaatttagcagggagtggtagtgtgagcccgtagtcccagctacctggtgttgggggcgggggcagtggctgaggcaggagccttgggaggttgaggctgcagtgagctgtgatcataccactgcactccagtctgggcgatagagtgagaacctctctcaaaaagaaacaaaagaaaatcacgagagagaatatttttagtgttcattaagtgtaagtggatcatcataaaggtcttcatccttgtcttcacactgaataggctgagaaagagaaagggttggtattgcggtctcaaggtggcagagatggaggaggtagaaggagaggcaggcacactcagtgtaacttatattgaaaaaaattatcatgtaagtggacccagtgcagttcaaacccttgttgttcaagggtcaactaattgtttttttgctctgtgggaagctttatggctctatttccagttcagaaagtgctgagcgtgtggaggtaacttaatttggcctttatttttctgcttaattacatatatgtctgaaagtattgtgaacctttttgtacttggatctgttgatttgtagtcaattttgggattttcctccctcttctaaaaatacagtacaacagaatatttgacatgtttataaataaacatttatactgccatttcaagaacattattttgggctggatgtagtagtttatgcctgtaatcctagcgctttgggagcccgtggtgggaggattgcttcaggcccggagttcaagaccagcctgggcaaggtagcaagaccctgtctttaaaattaaagaaaattattttattaatgcttttaagtggtattaggtaccttaaagttacaacttaggtacataaagtttttttgggaaaatgatacggtttatatctatatatatatatatatatatctatatatctatatatatttcaaattttttattttatattaacttgatatgaagatggaaattgttgggtaaaattaattgtggttgatagttaagattaacatacgctgtcatgagctttgaaagagtaaccatgagtcagattgttaatattgatcatttattgtgtcattttacaaaattattttcaagttataggttgttattagtgctatgtttgtggcatcctgtaacggtacagtctaattagagatcaggcagtatgtagtattttattgtaattattttgtcttttaatgtgtttagcccaaagcagtgtccacaccagcaccagctacaactcagcagtcagctcctgccagcactacagcagttacttcctccaccaccacaactgtggctcaggctccaacccctgtccctgccttggcccccacttccacacctgcatccatcactccagcatcagcgacagcatcttctgaacctgcacctgctagtgcagctaaacaagagaagcctgcagaaaagccagcagagacaccagtggctactagcccaacagcaactgacaggtaggaactggattctaggacattctatctcaaaatccgtgtttaacaggaacttcatgcatttattttgattattgttttgatcaaaccgactatatctattacgttaagctttttttaaatgtttgactaaaacatatgctgcgtctgttttgatagcttactaaggagaatataagtacaaattttcataatcagatttctgtactctgttgatttgggcagggtggggggcagtggaaaggagaaagcaggtgaaagtcatttttttttttttgagtagaaacgttaggaaatacaaataaccaaaatgaataaggattacatcatgacattgccaccctgatcatcatttgtacttgatctgtattctttgtggtcattgtcatatatatcataagcatccttccatgttagtaaatctttcccgtagttatatagcattgtgtttggttctgacatttgttagctcttgtaacctgaacctatggactatttcagtttttcactgttgtatctgtatctttgtgaacttgtgagaaattcaggcttctgcctgtgtggatctttaggggaaaaaaaaggaaaagagtgttgagatatttgaggagcaagaaataatttcttgtgggaagttgacagcagagacacctcaactaagtggctgcttaggcagttaggattattgagcagtttaagacaagacttttgtttttctccccagacgatcaggtaaaatgaccaaagcaaatgcttaagtcagagttctcttggttggaaatcatacagcacaattccttgatctaagagcatgagttatattatgaccagccttcactggcactacagctgtttgtattttgtgacttagtgcaactcaggacctcagaggcagtagttatatgatctttggagtcagaatcagacacagtggaaaactatgcagtgactggaagggtttacagacatggaaaggggttaagatatatatgacaatgatcagaaagatatagttgtgatccttcattttagtgttctgcctttgagtgtggtttctgtgtctgacttagtcaaccatgtttggaggagtctgagccacctggttcattgcttacttgggggtctctttctaaataattgattccctaagaagacaacatgggtttaggcaatagaatatttgccctgttacttgcctagaacactgctttaagcattctatgacaccattgcctaacttgatccatctttcccatgtacaactagaaatgcattcaaccatcttatcctagtggataccacctagagtcaggttaagctgttacatcaaagggctgttgatcaggtctgtatatgagagggaacttacgcatttaaaaaattggtttactaaagcacttaaatattacaaacttaatatgtcttaagtcagcacaatacatcttattctcttaattgctttaagctcctttttaaaaaaaaaaagcttacagtgtgagaattttagagttgatcaatacattttaatgtgctaatgccatcaatttaaatttctttcttcattaactccatttttttttttttttttggagacagagtcttgctctgccacccaggcaggagtgcagtggcgtgacctcggctcactacaacctccacctcccgggttcaagcgattctcctgtctcagcctcctgagtagctgggattacaggcgcatggcaccatgcccagcttatttttgtatttttagtagagaaggggtttcaccatgttagccaggctggtctcgaactcctgacctcaggtgatctgcccacctcggcctcccaaagtgctgggattataggcatgagccaccatgcccagcccattaactctagttttattttcttcctggagttgcagttttacttacctattctaaaaagagccagggttatcttttcagaccttttcagacctacagaagttgcataagtaacttgatggtcagtgatccaggaaagcagacactagagtttgttacttagttggactttgtacaccaactgcttactcttatttctcaaaattttacctcagaaatacaacacaggaagagaggaatgagggaaactcagaaaacaagctgcttaaatgtgtcttagttcctttgtctttgctggaaaatatctagtgtcttgtgaagcacaaaacctagtgaataattatcaggagataagctgttaagactttgtggagtgactttgtgggaagtctgtttaggaccactgacctgacgttttgttattagggatttgtttctttaggtcaattttgttcttttaaaaattgtctgttacagtgcaaattccacttgatatctacctgagagaaactgcacttgtgcacatgactgtattgtttgtagtaaaggacaaattggaatcctaaattgacctgtggtttattcgtagtagagaacaggactactcaaagtgtggtagtcaataggctgcatcagcatcactgggagtgtgtttgacatgaattcttgggccaccctggacctgtaaatcagaattatctgggagtggatcccagaaatcaacaagccctcctggtgaatacttgggattctcggactttgtaaaatttgagaaaccctgatagctgatactacaagacagttaaagtatgtaatgtataagcatgttaaatgagtgtggttttgaggctttgttattgagtgaaaaaagcaggttgcagaagagtataggcaataaccataaaccagacaaaacccataaacaacattgttcattttctgtgggtatgcatgttaatgtgtagaagaaaagaaggcaagcgttgacatataactaatgagtggtttcctctgtggttggagaggggagaagtagtgagacagaatcaagattaaagaataatggttaaagtctatgtacatccagtcttatctgtggtgtttaaagagaactttttaaaaacaatgtgtgggccgggcgtggtggctcacgcctgtaatcccagcactttgggaggcagaggcaggcggatcacaaggtcaggagattgagaccatcctggctaacacagtgaaaccccgtctctactaaaaatacaaaaaattagctgggcgtggtggcgggcgcctgtagtcccaggtactcaggaggctgaggcaggagaatggcgtgaacccgggaggtggagcttgcagtgagccgagattgcgccgctgcactccagcctgggcgacagagtgagactccatctcaaaaaaaaaaaaaaaaaaaaccaatgtgtgataatagtgtaaattattctaagggagatgtgtcttaccggattttaaaatgtattatacagtaatgattaaaacagtttggaatggctcatattagaaagattggtcagcgaaatcaacaatagctttgaaatagacccagatagatacaggaacttaatataaaggtacagtttcagaacaatgtggggaaaatgctattgagatctcaccatctagaatgaaaaaagaatgacccctcatactgtacacctgcaaaaataaattatagatggatacggatttaatgtaaaagcaaagccataagctaatggagaacaaggaaacaaaagaatagtcttcactgtgagaagtcattcttaagcaagacaaccaaaaaaaaaattataacaggaaagattgatgaatttgactatagaaagaatttaaatgcaggaaaccaaactacacattgcttaataagagcttgatttggtcttttaaatggaatactgtgcacatttgggaagaaattgaagtagatttgattgtgccgacatagaatgattgttaagttaaaaaaacaccaaagcaagacacaagttgttattcttttaaatagaaattggtgtcatagtggttgtctctgggttaggggtaggaaaaatttagtttttatgtattgtgcgttttgaaattttattttctctgcattagttttacagtatatttaatgaagaacttaaattataccaagggattatattaatcatagtattcttattgggtgttacgatgccagacactttgctaagcactgtactagtgtagccctacccacaacactttggagtatatgatacggtcgttgacattgtactgatgaagaaacaggcttagaaaggttaagtaatttatgcatccaaacttgagttttctgctcttattatgtactaccaagggctttctcagaactgaaatataatgtgtgtgttgtttttaattgagatacaggtctaagtgtgtatgtgtgtctgctttaatttaaacttctaactactacctttaccactgttgtaaacttaagtttatatttctttggcttgctcttggtctttcataattttctgtcttttattgcagacttctctgtagtttcccaacagaaacttaatctctttaaactgattttcattacattcaaacttggatttaacccatatctaccttttttgcatatgctatatttctttatttgaatatcttctttcagtgtcctcattcagaacttacctataagacttcattatgtaaagactttatagcctaatttggtttctccatgtgctattttgtatactgcttttgatatttcttctggtgtgacttgatttataaattatttaacttctcatgtaaattatttcaggtaaataattgtgcattatcttttttgtattcaatagatagctgttaggatattattttatatattttgatatttaaagtgatggagtctcagaatagaaggagtaccaagattgaaaatttttcccaaaccacaaatgttgtagataaagcttttggatttaatctagaagagacagtttaaatactgtagtcagacttttatatttaattaaaatcaaagaatctgtttaccaattggatagttactaaactaatgtaaattaaattttatatactttttaaaatgtgatttttctaaaatccttttgtagtacatcgggtgattcttctcggtcaaacctttttgaagatgcaacgagtgcacttggtaagtatctgcttttccttataaataacctataaagagataggaaagaggtttcacttttctagatcatgataaaagtgttaataatttgcatggttgtttataatcaagctgtaagatgattgatttaggtaattattcaattaatagtgttactaaagacttttaatgtttatgtattgagttctttaaaacttgctctgagttgagcctacttggttaaagcaaataaatttccattttccggatgtgaattttaaatgtgatcctaacatggttgatctgtgtatggatttattacaaagggtctttgaaatgggtatgaaatttttctaagatctgcctcacacttcatgtgtattcaccattagacttaattcaacttgatggcactatacattcccatctacatcttgttgcttgcattggcttgcagcaaaaatgcctttttatcccaacttttaattttacctactgaataatgcctttccatctcccatcaccccaatctgtcaaaatgaagcagcattttttttctcccattgtagcatctctgatacagttcctgctaattactggtttattggctggcaactccattcctagtttgttacttttaaatggcagggagggagaaagcgaggaataggtagaaacagcagctttggtgcagtacaggcttctggattcctgcttagcttctacagcagcagggttccagcagcagtaccacctcctagcatctgagttggttctctgagctagttggactggaactccgtgatgcccttgttgctgtggaaaatggcatgtacatttagtggcaaaacggcagtttaaattatctaagatcgcctgggtgtgacaaccccagattttcatctttgaggagcagtgtcctaaaaccactctgctatcaaatacagtgtgagttagtctctagccaggaaaacagaaaccactctatttcaaagagggaaaggcttaatcttaggaaattgttaggaattggaagggctggaaaataggattacccagagaggcagtaaactgtctgtggcctcggctccagctggagccagctagcacttgcccctgatggtgttgaaggctctggctgtggtcactgctgctgcagctggaatgcattgatgctcctgagttcccgggagcctgggaggccatgctgtagctgctgctactcaagcctctgtgacgatgtcttcccattctcagctttatggtctcgggatccctctacattttcatctttaatttacccaagtctctatgttgattccctgcttttttattttattttatttttctgatttatcttgttgctgtacaaattaaccttgcttctttaaactttccttctttggctgctgtgacaccactcttttcctgatccatacctcaggctcttccttctcaagctttctagttaattcttttcttttttcctttattttcttttctcttttctttcttcctttccttttcctttcgtagtctcactctgtcgcccaggctggagtgcagtggcatgatctcagctcactgcaacctccacctcccaggtttaagcgattctcccgcctcagcctcctgagtagctgggattacaggcacgtgccaccacgcccgactaattttgtgtatttttagtagagatggggtttcaccctgctagccaggatggtctcaatctcctgaccttgtgatctgcccgcctcggcctccaaagtgctggggttacaggcgtgaaccacagtgcccggccagttaattcgttttattttacctgactattaaatgtatgagttttctatggttccattctaggtcatagttcaaagtttaaattatgggaatgaccaataccatccatatactatatagattccccaaattacagctgcagtacagatctccctctgaactcccaaactcgtatcttcacattgtcaactagaaaactttagaacctccatgacttcaggtttcaaactgactcattttttattccccagtctgattcttttcttgttcacttcttacttgtaccatcattcattcatccaccctctgcctcttttggcccagtaagtctgtttcttttcttttcctttctcctctctcctctgtcctctctcctttctcctttcctttctccttccttcctccttccttcctttctccttccttcctccttccctttcttcccctcattccacagttactaatgactctgtttcttaaagtctctggaatatttgttttcactgtcatttagttgccttagttcaggtccttatttcacttgtactcttgcattatccttatccacctggtctgcctcttccttaccagagtggaaagcaactctcatggggtctttgttaattcttttaatagttcctcatgacctggaagataagtccaaagcttattctttttaatttttaaaatttgtatatagggagtacaagtgcagatttcttacatgcatatattatgtggtggtgaagtttgggcttttagtgtagccatcacctgaataatgaacattgtaccaaacaggaagtttttgaacccacactccactccccaccttttttgtagtttccagtgtctgttattccactctatatgatgtgtgcctattgttcagctcccacttgtgaggacatggggtatttgactgttactgagttatttcatttaggatagtggcctctgtagttctatccatgttgctgtaaaaaagacatggttttattctttttgatgggtgagtattattacacacacacaccacattttctttatctcatcctccattgatgattccatatctttactattgtgaataatgttgtgattaacatacaagtgcaggtatctttttgatataatgatttatttccctttgggtatatatacatagtagtgggatttctggattaaatgatagttctgtttttaagttctttcagaaatttccgtactgttttccataaaggatgtactaatggacatttccgccagcagtgtataagcattctattttctccacatccttgcccaacatctggtataagatggggcatctcattgtggttttaatttgcatttctctgatgattggtgatgttgagcattttttcatgtttgttggccacttgtctgtcttcttttgaagaatgttttttgccagtcatgttttttgcccactttttaatggggttatttgtttttttcttgatgttttaaagttctggataatagcactttgttagattgcctaagccagtgtccagaagagtttttctaggttttcttctaggtttttttgtagtttcaggtcttaatatttaggctttaatctgttttgagttgacttttgtgtttgatgagaagtctgggtctagtttcgttcttctaaatatggctatccaatttcccagcaccatttgttgaatagggtgtcctttccccggtgtatgtttttgttgactttgttgaagatcattttggttgtaggtatgcagctttatttctgggttctctattctgttccattgattgatgtgtctgtttttataccagtaccatgctgttttggttacaatagcctggtagtattatttgaagtcaggcaatattgatcaaagcttattctgaatgacatatataaggttcttcatcaccacctcttttgcctcattactctgtttcttggccagtctctctcgtttttgttttttttgttttgttttgttttgtttttgagactctctctctttgtcacccaggctggagtgcagtggcacagtctcagctcactgcaacctccgcctcttaggttcaagaaattctcctgcctcagccttccaagtagctgggattacaggcgcctgccaccatgcccagataatttttgtatttttagtagatacggggtttcaccatgttggccaggctggtctcgaactcctgatcttaggtgatccgcctgcctcggcctcccagagtgctgggattacaggtgcgagccactgtgctggcctctctagttctttttacaagtcatttgcctttggacttttaagatctaaaaagtatcacattgcttatgggtatttttttgagattgtataatttaactaggaaacatgattttaggagtcatagtgtaatgattaggtgtggagactcttgactgtcagcctgtgtttgtatctctgcaccatgacttaatacttttacgaattttttttttttttggagacagtcttgctctgtcgccagactggagtgcagtggcgtgatcttggctcactgcaatctccgcctccggggttcaagcaattctcctgcctcagcctcctgagtaggtgggactacaggcacgtgccaccatgcccagctaattttttttgtatttttagtagaggcggggtttcaccatgttggccaggatggtctcgatctcctgatctcgtgatctgcccgcctcggcctcccaagtgctgggattacaggcgtgagccaccatacctagtctttaccaaattattaatctctccaagctgtaccctcctcatcttttaaaggagttgaaattaaacctttcttatgaagtagtgagagagaactaaatgagaaacaccatgttaaaatagtgcagttctgattttttgtagctcgtaatttcgtttgtattgatactgatttctgtatctgggaattaggttactgaacatgtattgctacttgagttgctttgtgctcgaattatatcagtagataagaaaataaataattaaaatttattgttttatgggatgggaaaaggaaagtcattattttaagcaagatatcaaatgcttaatctgtttgtgatatttgggggtttttagctattaaacacctttatttttgaaaattctgcagaaaaaaattattcaacagatactcggtttcagctgtgtatcagggaaacatgcagaatgacatggtttcctgcacagtcaaacttgcattcagttggggcaagaaaaaaataatgaaacattaaaaaaaaaaaaagataagtgatattaacacaaagggcttccctaaagaaaaaacagaaggctacctaggatgactaggcaatgccttttaaatatggaactgaagcatgttgaaggaactggccatctaagatggctggtgttgtgtaaaggccctggggcaggaaaaggtgtggcctgctgaagtaacaccgggaagatgagtgtggtgggtggaggattgttgagggctgggagccagaaataaaatgaggggttttgcgcacacgcgtgcgtgtgtgtgtgtgtgtgtgtgtgtgtttacttgacttttgcaactggctgaagaacagattatagatatggagacaagagttggaaacagggtgtaatcccatctagagactgttgtgggcttgtcttcagtgatgacagtagagaatgaagagatgggtttggggtgtaatttagagataggacctaccaggtatgctggtaagtgaggtgtggaaggaagaggaaaaggaactgaaatcaccagggtttttgtccaagtgcttaggtaaatagaggtgccatttgtttaaagagagcagacagacaatggtgggacacatttgagagggaaatctgaattgcaattagttgaggaatgagtggaatgtgagaaagtggacacatgttcaatagctatggctgtgatgagaagacagcagatggttcctcaaagaggaattaggatgaagtcaaaggtgggaggtgtgtttttgttttagagtgaaatataggacatagttaactactgacccaggataattacacagaggggtaaagatgttggtggagaagagggaggataaccaaatccagtttggtttgagtgtgaggcaacaataaaggtaatggtccccagaacacaagcagaagaaaggatagttttaagtgaggtaagtttatgaggaaaataggtttcatttattcagagtgttgtctgtattgagaggagggagcataggagtctgtaagaagtgacttggaatattagcgctttgggcattttaccaactttgtatagtgtacaagattttaactttctagctcctaacctctctttcccccgtttcagttatataaggtatcaaagggaaactgtgaacttgttccatcggagttgatggtttgaaataccatcccttccccagcatgttttcagaatttggtgtctcttcttaccagttgccttccctgacctcctgctaattctcccttaccttcatacctcatttttctattgtactctgaaacatattatatgagtttcctgttgctactgtagtaagttaccacaaacttattggtgtagaacaacacagattaactgtcttctagtactgtaggttagaagtgtgacacagggctcactgtactaaaatcagggagccggcattcctttttggagactccggggaagaatttttttcctgatcctgtcctaccataccttggctggtagcccctttctgcatcttcaaaggcaacagcataacatctctcatcctggttttgtctcctcctcctcacacctgtttctctgaccctctcatctgcctcctcctactactattaaggattcatgtcattacactggacccacctggataatccagaatgaggtctctgtcttaaagtcagctgattagcaaccttaattttatctataaccgcaatttccctttgccttgtaacctatttataggttccagggatcaaaccagagggcatctttgggggaccattacctactacatatatgttgtaatttatactgttactcatctttgtattcccagcatagtagttcctgaaatgttgtatacatgaatcaataaatgtatagagaatgcttatttattaaatgttcctttttttcccctccaccctccctttttagtgacgggtcagtcttacgagaatatggtaactgagatcatgtcaatgggctatgaacgagagcaagtaattgcagccctgagagccagtttcaacaaccctgacagagcagtggagtatcttttaatggtgagaaatatgttttactttactccattctgttgtttaagattaaaatctcaaagaaacagattttaaaggaccagttcacttgtcactgatatatgctagatgatatacataatgcttttttttttctagtatgtttgtattttgtgttaataaaatgtaaccttttttaatctaatggtccaacattgtagtagctttttaggtgccactatgcgtgaattattcagaacaaaaatttcttttttcttttttttttttttttttttgagacggagtctcgctctgtcgcccagactggagtgcagtggcatgatctctgctcaccacaagctccacctcccaggttcacgcctttctcctgcctcagcctcctaagtagctgggaccacaggcgcctgccaccatgctcggctaatttttttgtatttttagtaagatgggatttcaccatgttagccaggatggtcttgatctcctgacctcgtgatccgcccgcctcagcctcccaaagtgctgggattacaggtgtgagccaccgtgcctggccaaaatttcaagcttgagaatccgggccaaattcttttgcttatactgtgtatatttctgtaataagttgccagctttttaaaaactgggaaatttcacataaaagtacagatttctggtttaactggacaactttgatcccagatttttgcaagggattaaggaaaatattttagatcgtggaatctaattcattatcctctgattcactctgttaccaacgtaacatcatgcatttaatgaatgatgttactacctggttccgttggcatttgaatttgtttttatagtcagtaggagttgagggactttttgaataaagtattcttttttttactggtaatgggagtttttgagaaataggttgttgtggacatcaactgaaacccttggtattaagatgaaagtctgctagttttacagatgtgacacaggctaaagtaattgaattaagttttttaaaatctcagacttctataattgtctggtgttttggagtattatcaaagtctgaattgccctaaatatcatcttaaagttgcctgattctaacccttttgggaattacatccacagtttaacccattcctttgtgtctaggttgtacttctgttaaaaactcctttcaggtagctagctagtttcagaagagtcagttataagcctcataactgtactctgcctccaccatttatttgcctatgcctttgcatgtgaagttcacaaaacctttttcttagcatattattttatctttttaaattcactttttcattatcttcttgagtagtgtctttaaatgctggcagtttatccagtttgtttggaattgtggaattaataattgttgtgaatttgtttggtgaggagtgtgtaccctaaacagattgtataaaagtattagcttttatggagtggctttcatttacacctgatttagaattctgtataagttcaacagtatcagttattttgatctaatagatgtggagttttgaggtataaaaatacagaatcattgttaccaaatgctaaaactgctgtagagcatcaaatgcaaataaatagatgatacatgagttcatcaaaaacaatttataactaaaatgttttttatatatttgctctttgtttcatagactgaaggggaaaagttgcttttaactgttactagttaagagataggttaaggtgaacggatggaaagaagaaatgttgagcatttatataagaggctatgtaatgtgtgagaatagaggtcgatctatagcaataaagatgaactttttagtttaataaaagagaatttgatggacgccctggatcctaaatttgtatgtagtttgttagcacttaaataactgcccatctgagttaagggtttgcgttggttaactcattcaaaaacattggttttaatgcctggagtgacatctaatccatgcagccattttcctgctgtgttactcttcatcctttatatgttgttgcttttggcttctggtttattagggaatggaagcatttatcatcttattcaattgtaatacttggttctttattctcttcaaaatctataagaacttgataaagactttttaaaaattttaaatgacaagtctatcaatcatgtgcatcaaaataggtgtcccaaaagagtttagtgcatgcagttttaagctcttaataactttaaaagataagtactataaacttacaaaaggcatcacctaaaaactaaatggtttcaatttcttttatatcgattttatgaattttgaaaaattaaattttttgagatactttatctcattttttgagatactttaagtatctcatttatgagatactttaagtatctcatttatgagatactttgacactttaagaaacacttcactgaaaagtacctcaaatttatgagatactttctgagtgacactttctcagtaccatggatcagtaggggagatcctcctgcctggccactgtgtacctggtctgtatccattagatattttttcccccaggagtcatttcagaactgtcaagtgtgcatcaaaacctctttttggattatcttaagctagagttgcaaactcaatcctttttatcactgagtaacagctgataaagatttctaagaagttaaaaagtcaactgaactaataggtagcacaaaaacctttggttgtgttcagttttaagaaggtacatgtatcaatatttttcaaatttgatgctaattacgtgtgcctggtaggtgtcttattgaacaacacagagaatatttccatcatcatggtaagttctgttggacagtgctgctttgcattattatagcaatgtgggtttttctataatgcacccaggtcatttctaatctaatttgaatccatgcagcttaataatcctttacttttaattgaagcagacatctgtttgatgcttttgaaaatcaaacaagatgttaaatagactataaatcttttactctgtataatatttaattttgcatgatgggatatcttaaagcttggaaattctattacagggaatccctggagatagagaaagtcaggctgtggttgacccccctcaagcagctagtactggggctcctcagtcttcagcagtggctgcagctgcagcaactacgacagcaacaactacaacaacaagttctggaggtaaagcggaatcttctggatggggagggaatggccctgaatttttagtgtaaaataatttaacctgaaatacttcagaaatgacgttcattcccagagcagtcgaataattcgttaagttctctcttcactaatgtttgagaaaggcccaaaagaaactttcccaagtggatgtaaaaggtatccttgctgatattaaacatcagtgttgcagttttgccgaagggcatattctgttttatttgttttaaggaaaagatgctttccagtttgtatttagtgttactttctgatgccattcagaatggtttgctcactttgtctcttactctctccataaatgttacaaagtgtatgtaatttcaaagccagcaggattttagtaattatacagccaaggaaatgaaaccgtgagaggtttaaaaccttgtatctagaggagaaagcaaagcttgaattgaagtctctttactggggtgctgaccataccccacacattgctataggtctgactacagagcaaagcctggaacctgcggtcagcttaggaattacgcagtgttctccttcgttcgttcttctgtatattaataaagtaatttaaactgttgatcttgaaaaggccattcttccatgcatttcctagctctgataatgatagtcacctctggttgacaaaggtcactcagtgctttgtgtacagtctcccaaggacaggccctttgtttgttgtgattcagcatatgggagtggaaagagatgaccacagctctgctttggatttggggtcctgttcctttcagcacttattaggtgacatagtctctaagtctcgttgccttcacctgtaaagctggtattatatatggaagaacaaaaaacccatgtgctgtggtcatttcaattggaatgattgtcttcctgaataggaaattacaacatacatctaaaaattctcttttattcattagtaacctcaaaaacaattcctgtatgtacgatttttggtttcctatagcataaccagacaagtaccagcaccctgaaaaagccagaagttctgtattttatattttatttggcattattaacatttattattgtgaatggattttagactgaagagtttagatatattagtactagattgccatacagcttatttatccgagtttttgtagttcacaaatgtttgaaaattaatggtaataaccggaagtcttccttaatgtaagtttggattaaagtttctcctgatttgcaaaacctgacctcagactttaaatatctttttcttctttggtttcttgaattcctaggaattcaagctcagattgtgttcttttaggggttttcattgtttataaagtaagtgagtttttgtttttgttgtggtgtatatttttcttaggaacttttaagcaacaggaacaacttttagtactttttattttgatagaacacacacaggagacaagtttctagtattattttataacgttgagtgccaagggcaattataggaaagtttggttcatattacagtcagcgttctgcactccctgcctttgctaataggagtaatttttgccgtataaaacttgcaagttggtacagttggaagatttcatcattatttacttcattttattacatctgagaactcaaatcattttttctttgatagtgtttgctgtctaaatgtattatttaaccactgtttgtgtatgtatttactgcttttgtttagaaatgtttatgtgtattttaggacatccccttgaatttttacggaatcagcctcagtttcaacagatgagacaaattattcagcagaatccttccttgcttccagcgttactacagcagataggtcgagagaatcctcaattacttcaggtgactaatcagtgtcagtttcacaagtgatttagagtgtgtcacaatttgaaaaagtccatgaacggtccttcccctcctcaaatacaactctgtatttgagaatgtgaatgttttcttccaagctacacttagatattgtaatctagataggtgtactaaaaaaacagttgggatatggaggttgggttaaattaagttgaccaaatagtagtaagtttgggaaacattttatatttcctttttggagattcccactacacattaatatgttaaagaatttgggaagctgtttaacagagaaactgcctaactttaaatcacttttcacaagcttattactcagttcctttttcttaggaacttttaagcaacaggaacaacttactcttagaaaaaatagctgtggggcttctttagtgatcagatcaccaagtatttgaattttatacagcattttaatgcccactagtgtggaaggtaaaaaatacatgcaagtattaagaataagttctattcttatagtcccacagtagttttttttgtttgttttttgtttgttttgtttttttaagcacaggaggctcagagcacttaagaatttgaatttcttcactgtttactttgcccaaaagtactgaatttctttactattgtataagaaatcacatccttccaaagactgaataatccagaatcactaaattacgtttgcaaaagtgtagccttttctcttagtaatatttagaatttctctgttcctgcagatacttaatatcagtgtattatttttctctgtccttcatatcaccacagcaaattagccaacaccaggagcattttattcagatgttaaatgaaccagttcaagaagctggtggtcaaggaggaggaggtggaggtggcagtggaggaattgcagaagctggaagtggtcatatgaactacattcaagtaacacctcaggaaaaagaagctatagaaagggtgagtttaagtaaaactttaaaaaaattagttcttggctgggctcatgcctgtaattccagcactttgggaggccaaggcaggtggatcacctgaggtcaggagttcaagaccagcctggccaacgtggtgaaaccccatctctactaaaaatacaaaaattagctggcgtggtggcacatacctgtaatctcagctacttgggaggctgaggcaggagaattgcttggacctgggaggtggaggttgctgtgagccgagattgtgccactgcactccagcctgggcaacagagtgagactctgtctcaaaaaaaaaaaaaaaaaaaaaaaaaaaattccttagtcacactagccccatttcaaatgctcagaagtcacatattaataataaggtttttctataatttctttcaatagtgtcctgtagttttcagtgtagaagttgtgtaatacttttgttaaaattatttcgaagtatttttattctttttgatgctgttataaatggatttttctcttaatttcattttcagactgttcattgctaactatataaaaatacaatttaattgtgtatattgatcttttatcataaaaccttcttgaactgttatttattcattaagtagtttgtgcatgtgttcattaggattttccatatacaaggtcatgtcatctgcacatggagacagttttacttcttttccaatatggataccttttatttctttgtcttatttaactgccctatctggagcctccagtatattattagactagcaagaaccaacaacatccttgtctggttcttgatcttaagggaaagcattcagtctttcatcactaagtatgatattatctatgggttttttgtggatgccctttatcagattgaagaaattctcttctgttactagtttgttcatcacgaaaaggtgttggattttgtcaaattttttttctttctttattaagatgatcatgtgatttttgtcctttagtatgctttattacattgattgattttgtatgttgaaccaaccttgcatttctgagataaattttactggttacagcatatgatcttttttatatgttgctggatttagcctgcttgtattttgttgaggatttttgcatctgttcataagtcatattggtctgtagtttttttgtgatgtttttgtctgaatttggtgtctgggtaatactggcctcttagggtgagttgggaattattctctcctgttgtctggaagtatttattaagaattggtgtgggctaacacggtgaaaccccgtctctactaaaaatacaaaaaaaattagccaggcgtgatggtgggcgcctgtagtcccagctactcgggagactgaggcaggagaatggcgtgaacccgggaggcggagcttgcagtgagccgagattgcgccactgcactcccgcctgggccacagagcgagactctgtctcaaaaaaaaaaaaaaaaaagaattggtgtgaattttttgaatagttgatagaattcaccagtagtctggtcctgggctttttttggggggaagttttgtgattattgattcagtctcttgttacttgtctattcaacttttgtatttcttttttttttttttttttttttttgagacagagtctcgctctgttgcccaggctggattgcagtggcgtgatctccgctcattgcaagctccacctcctgggttcacaccattctcctgcctcagcctcccgagtagctgggaccacaggcacccgccaccatgcccggctaattttgttttgtatttttttagtagagacggggtttcaacatgttagccagggatggtctcgatctcatgacttcgtgatccacccgcctcggcctcctaaagtgctgggattacaggcgtgagccactgcacccggccaacttttctatttcttttagagtcagttttggtggtttttgacttggaatttgtctattttatctaagctgtctaatttgttggcgtgcaattgtacatatttccttataatcattttatttcctcttttgataaagtaataatgttcctgcatttattcctgatttcagtcatttgagtcctaagatatttttgttttttcccttcagtttagctaaaggttttaattttgttcattttgtggtggttgttgttaatgacaaaaataactttgggttttgttgattctccctattgtttttctagtcttttgttttgttttgttttaagtctctctaatgtttatttccctcttgcttgcttctagtttgttcttccttttttaggttaggtttagtttagttctttgtttagttttagtttaagattaaattattatctatctttgttagcatagatgtttatagctataatattccttctgcgtttatgctatagtagcatcccataagttttagtatgttgtatttttgctttctttcatctcaaaatgttttttaatttcccatttggtttctaatttaattcattcgttatttaggattgtgttaatttccacaagtttatgaatttcccacattttctcctttcgatttctaaattcattccattataatcagagaatatactttcaatacttttcaacttattgaggttcgttttgtggcctaacatggtatttctgaagaatgttctatgtatactgaagaagaatatagtgtagttcttattaagtggtctataaatatctgatagatctagtttgtagtcaagtcttcttccttagctgttttatctattattgaaggtggagctgtagttgtctctattattgttaattgccaatttctacctttaattctcagtttttattttatgtattttgtggctctgttatatataattgttgtgtcttcctgaaccctttttatcataaaatgccttttgtctatagtaacaatttttatcttaaatctgtttcctctgatatagccattctagctcttttttggttaccatttgcatagtatatacctttttctatcattttactttcaacctacttgtgtctttgaatctaaattgtgtgttttgtagaagcaggcagttggattgtaccctttacttcacctatcctagctttaatctggataaaacccagataacaaactgattttttagtttcttctgctttcatagatgaatagttattcgtgatgaattgggatttttgcccaaattttaagggttatttccaaatataatctgacacagcagtctttaacctttttggcaccagggaccagttacgtagaagacctttttttctaccaacataggtggggtgggcgcagtgattttgggatgaaactgttccacctccgatcatcaggcgttagttaggttaggaagtggggtggggcggtggttttgggatgaaactgtttcatctcacatcatcaggcatttgttaggctatcatacggagcacagaccctagatccctctcatgcacagttcacagtagggttcatgctcatatgagaatctaatgccgccactgatacaacaggagacggagctcaggtggtaattcgagtgatggggagtggctgtaaatacagatgaagcttcacttgttcgcccactgctcacctcctcccgtgcggcccagttccttgctcacccactgctcacctgctcctgggcagcccagttcctaacaggccaatggctggtgccagttcacggtcttggggtttgggacctgtgatctaactcaaggtgattgagacaattgaggagggtgacatttggctgagtttttaaaggcttttaaaaggagtgagtattgtcacaagtgatttttaatataatagactaggaaaatgaaattaagtagctggtattaccatttaaaatgctgtaactgttaagcagataaaaatagaacattatcttcaaaatgtaccatgtattactaataattggtcacctgtttttctagtatggagtgttgaataaagcaaggagattgagagtgatgtttgatccaaatgaaagacatgagttgacattaataaataaaacataatttgcttttaatttagaaataggtgaggtggttaaactatactgcaggtactctcatccttatcttcactcttaatatactaaaagccatttgatttacatatttctgtagagtcatttatttttaaaccatagcagttagcagctaatttttaattaggccaaagagtatttgcatagtatctattaagctttaactagaaacaaagacttttttaggtgattagtaaaggaaagggtctagattccatctaatcccttgggttgggcagtaaatccatattgatagagatgaattcatgtaaaattctcaagagcttttttgggttgcagtatgtttttgagtaatgatttatctttagtgctatgctggaatctataatatgtaaataaaattaaatgtgccataattggtgtgttggatttatatttttttcctttttcttccagttaaaggcattaggatttcctgaaggacttgtgatacaagcgtattttgcttgtgagaagaatgagaatttggctgccaattttcttctacagcagaactttgatgaagattgaaagggacttttttatatctcacacttcacaccagtgcattacactaacttgttcactggattgtctgggatgacttgggctcatatccacaatacttggtataaggtagtagattgttgggggtggggagggagggatctaggatacagggcagggataaatacagtgcatgtctgcttcaattagcagatgccgcaactccacacagtgtgtaaaatatatacaaccaaaaatcagcttttgcaggtctttatttcttctgtaaaacagtaggtaacttttcctaggtttcactctttttagtgtactagatccagaaacttagtgtaatgccctgctttatatttctttgacttaacattggtttcagaaagaatcttagctacctagaatttacagtctctgtttcatggcaacactggataatggctttgtgaaatttaaaaaatttttgtagcgactgtaaacagaaatgccaaattgatggttaattgttgctgcttcaaaaataagtataaaattaatatgtaaggaagcccattctttcatgttaaatacttggggtgggaggggagaaagggaaccttttcttaaaatgaaaataattactgctattttaaaatttcttgatcattgaatgtgagacccttctaacatgatttgagaagctgtacaagtataggcagagttattttcctgtttacattttttttttgttttggggaaaaaattggtaggtgtctaattactgtttacttcattgttatattgcagtaaaagttttaaaacaaccattgcatgtttgcttttgatgtatccctttgtgaaattagcacttttggggccaatggagaaatgcagcattcactctccctgtcttttccccttccctcagcagaaacgtgtttatcagcaagtcgtgagtcaaactgctgccttttaaaaaacccacaaaatgctgattcagttcaaaattaatgcaaatgtttcaaaactgggtttctgatatttgtaaatgtgtttctttattagataagagtgtattaccattaaagtcattagtataatattgctttcaaaaagaaatggtagacaaaactataatccagcatcttttattgcattggaaagactggcaaagtcttttggatgggttgggagatgtggctggaaagtactttggaaaatatacaatcaagatatctcatggcatattaaaagaaaaatcttaatagcagtgttggcttttatttggattttttcatctcagttttttctgtggaatctccttcattggcattgttatttaatcataaacggggcagatgtctacttgttcagtttttcaaatctgttttcctgagtataaataagagtatttaaagaaataatttggattgcttttgttttttgtttccttttttttaaccatctgatactaagaagatgaatttgcacagatttctctgcataatttctcaatatctttagcacagtatggtgatgatgacttttaagcatttacatcacgtactcataacctattatgaaaataaatgaaactggctgggtatggtggctcatgcctataatcccagcactttgggaggccgaggtgggcagatcacttgaggccaggagattgagaccagcctgaccgtcatggcgaaaccccgtctatactaaaaatacaaaaaatagccaggcatggtggcgcacgcctgtggtcccagctacttgggaggctgaggcatgagaattgcttgaacccgggaagtgaaggttgccgtgagctgagatcacaccactgccataaacatgacaggcttttggactttgtattacctgtatgttttataatggatcatgcataatttctcaggagaataaaatgagaattcatatatacgttcatctttcaagtcagagcaatgagttgggaaaagaggtggcatttctgatcggataatggaatactctcatttattttatgacattctctgtctactcagatcatagtgaaaactggaaacaaaaaaaaaaaacagcctcttcttggaaagtgacagcagaaggtggcatggagcttgtgtccttggacaacaaatctggatatactaggattaattatcagaagacagctcaggccaagttttgatcgttccatacagtaccttgtttatctgcttcttaaagaatcagccgagacaccataaaagaaataggctttttgtgccttttgctgttaatgtttaatttacaaactgttttggtaaatctcttaatgtaagtagctatttgactttggaattttgcattcgaggtatactgtcatttcttgaaatctttttctcgtttagttgctctgtgggaaatgtgaggaagcctaagtttgtatttgtaaatttcttatgccatcctctagtcaaattttttttcattgtttaaaaatacggaagtgttccaatataattttttcctgtactggatggctaggattctagagaattgattataaaatattttcaataca

SEQ ID NO: 8 - DNA, 15525 bp, Homo sapiens
cttccagagagcaatatggctggttccccaacatgcctcaccctcatctatatcctttggcagctcacaggtgagtccggccggattctcttccactctcctgtctaccccatcctgaatagttccaggtttcttgttccactctgggcctctggctcaactcgggaggctctgtgttctcatctaacatttgctttttatcaatctctgatctctgattctcaggtcaggaagagactagagagagggggaaaaatggctctgggaactgactcccctgttgactgtcccagggatgaaggagctgaaagaagtggtgctgggtatcagagaccatttttctaatccaggttctgccatgagttagataaggaatgttaaagttttcctgggcctcagaaactttatcttctagccttctctccttttgagggcaactttaagaacaagatgatactatacaggtatgtatttatttacttataaatgtatttataaaattggttatgcataacagtaatataaatggaaagaatcacttgaattttctttccttactcaagcaatgtaatcagtctctacttagagaaccaactcataccataggcactttatgtttaatcccatggaggacagaggacagttctccacctgtcactggtattctagtctttgaagatttttctatcctaagggctctcagaaaggatcaggagccctataagtgagaaatatctcttctgtcatcaatctcatggagtactaccatgaggtccccctataaggacttcacataactgcttcattatgtgtatctgagcctgcctggagtgatctgcccaagaccacgcaggcagctggtgcccccaatattttcccctgcatcgctaagtggtcagcatcagcagactcttacccactttgaattcatcagaagtttgtatttttgagaggtacctgggtctaaccaggtggttctggaataggccctcactttaaaaaaaaaaaacaaaaaaaaaactccctgaacggaaatgatgagcagaaatagaacttgagggagataaggtggaggggttggggaaaattatagagactttgaaagctacaggtgtccatctgaaatcagtcagcgaaagagcacaagtatgaaaaactgccatgcaggtccccctctgccctcctccagaggcagcctgtgtagtgtacctcctgaggctgaaaggagacagagattgtcctggaacttccagtgggcagggcagtggaacaaatcctggcactggacaagcgcatccttggtttgacttagtagctgtattattgtaggcaaattactcttcccttctgagccttgctcttctcaggtgtgtaacagagaatgaaatctaagttgcagaattattgtgacattttaaatgacatatcaaatgcaaaataattattaaaataatcaccatttattaagttactacatcgcaggtgtttttcataccacctcctcatgagtctgtaagacagatatcattatccctgttttacagttgaggaaacttaggctcagcagagagatcacgcttcttgggcaagataacacagcatttataaggtagccagagattgagtttagaaagctagaaagctagtgctcttttaatcataacaagccgtctatcactggacctggcaccaaagagatgctcactacatgtgcatttgagctgaatcttcctcagggagtaccagttggggtttcttccctctccaggtacataaatctgaggtagaaactggaaaggcccgagaagaacgggtagctctgtttctgggatatgggtgtaccaacagggggccaccctggctaaactcagagggtccatgaagcagttctcatggcctcagtattctcatctgaaaaatgggcacagtaatctgccaatgatttgatgatacagtagtgtcaaggagacaatcaataaaaagaaaacaaaaaagtgggtgaggggaattgggagagtgttgaaaagaaccagaagaaacaaggaagagggggcaggagatgagtgaggagcagagtggtgagcaacctaaatgtgaatgtggtcggttagggctagagtgatgggaaaggtgtgtggtgaagcgggaaactttcaagcctctgtctgtggctgccttgtgtggcattgaattacactgctctttcgtgagtacattcgttaagggggacttgagtaaagtgcaatagatttcaaaccactttgggttttttttgcctttttttttaaatccatggtttccttttatggaatgaaattttacacagaaaaaaacaaataaatgactccaatgtatagagttgaagcctaacggaagcaagtcccatagcctcctatcctacgctcaccccttaaacctcctcctgagctcccaagaaatacactgaggcactgccacagcctccaaaggtggcgccatggggcacagtctgtgaaatcctgccttaggagccttggctcctaatcctggccttccactggtttgggaaacatcaccataaccttctgaatatcagccttcttatctgtgaaatgggattggactaagtaatccctaagactcctccaagctctgagatgctctggttcatggttttcatgaggagagtgccacaacacactgctacatttggacagaggcaccaagtgttcagagaagtgcttggggacggggttggcaagcaggaggcaggcttttccactctcccctcccccaaagtcttcctgctttatcaccatcccttggttctggctgcactgataatgtatcttcctcataatcgggctccttccctccactcaactcttgagactctaggggacaggacaggggaggaggtgacaaccaagaggaaaggaaggtgacaaagggcaggacctgttatcccttcctgttacagaggaaatctcacagctgactcctcctgatgcaaagacatctgagtcttggctggggcaaaagacaaagggtctcctgccccagctccctccaccttcaaaggcaggcgggggatgtagtggggaatgctcatggccgtcttaactttctggcttactttgctgagaagccatccaaaggtgttttgggatatctctgtttctcatttttagctatctgtgcagaaataaaaccaaaagatgggaagcctcctcaaggcctgactctcatgctctcatttcctgaccttgtcacccgcatcccaccttctcgttaggctactctgtacttctcaaaatgctttcaaatctgtattcacacttcatcttccccaaatgcctggaaactaaatgttgttatttatttctcgtatgagggttcagaaaccaaaactcgaagtggtaagtggtgaagcaatattggaaacaacacagaccactgaggcagaggaactaactcctcttccctcttccaacatttcttcattggggctttaggaaagtcaccccacttctcaaaactccagtatcccaatttataaagcagggcttaggctgtatctcacggggctgttctaaggatcaggagagaggatgcccactgatctggcttacaaaccacagagtgacaccaggtgtttgctgctggagttatgactacggaggcggcagaatggacccagaatggaccctgactcccagttaggccagagccctttctccctctgccacatgctggaggaggagaagcgacctctacccctctctgggcaggacttggtgaccccatcattgggtgatctggcctctaatcctgtggaccaatcattggctaatccacagcaaaatgatatatgcagcgaccaccaagggaggatatttctttctggagaatttaaagtgtcaatgaagtgaaattagtggtaaattttcaggggatgtgtgagaggaagagttggaggcttcctcagggaagagctttgaattagatacagggtttgaataagatttacatgaacagagaggaggataaagcacaaacaagagtgtgaggtagaaagtgagctgaggatcaggggagggaggaggccgggatgtttgtgtggtggccacatgtgagtggcagtcccagctgcatatctttccacagcaatacattgtcatcctggccttacgcagtcaacccatgtcatgtgacacccctgaactaattactgtacatgagaagggctaccacctgaactgggtagcccaaaccatttggcttgtacggaatgaggaaggggtaaaatggatgtaaaagaggcaggttacaaccttcactgcactgactcaggtagaaggttggcacctgaggagagtggatgaatatcatgggacccaatcctctcgagtcttgtgggtagaggttggtagccactctgtctccagggtctcactctgtcatccagggtggagtgcagtggcacgatcacggctcactgcagcctccaccttctgggttcaaggaatcctcccacctcagcctctcgagtatctgggaccacaggtgaatgccaccacgcccaactaattttttcattttttgtaaagacaaggtctggctatgttgcccagcctggtctcaaactcctgacctcaagtgatcctcctgcttcagcctcccaaagtgctgggattacaggcataagccaccaattccagcatcttccctttccataacacatgtagttatttatttaatgactatctaccaactccgtaagtgccagaattatgactgtcttgctccccagttataccctcagctcctaaacaatgagaactaaataaattcttgttaaaagaaggaatgactgaatctgacaagtgtgacctgcttagatatggtaaaactctatagggtcacacactgcaggtgcaaaaccatcacagaaagaagagcttcagttcagccttggacaactgaaaaaagaagtgtcttgtttctggatcccttttcgtagtcagctgagaagcagaagcaaaactggttaggaatctccaaccttgcccctgtcctctgaacccacattccgagaatggcatggagctactgttttctttcgttaccccttgtctcaccctgaagatacatttaagatagaacaatatactccatctataggctcatgttggtaatttgccctgtctcactctcaaactgtattctaacaagaaacaatgcgtttggcaacattttcttatatcccacacgagtcatgtcccttggcatttaccctgagaatacagcactacgtgtgtggaagcgtgaaaagagtaattgcatgtgaaaagagtagttgcatgctagcaactaaagccacatctttgtagttttgccacttcctcaccttaaattatagcttcaaaatgaaatgtgaaaatgaaattacttgaaggttgccctaagtgtagaaactgtacccatttggggccaaatgatacccaatctttatttgacttcataagattcacccctttcatctctgctgttgaagtaaaagaacaaatgcattaactgatcaaaatttcagaataaaattgattttgtctgtaacatttcctggcactatttggacttgacactcctaaagatgaacaaagagagcagtcgaaaaaccatcccggccttaatattaaggaagcatagagaacagtttttttaaaaaatcagattacttaatgggatgatttaataaaagcttgagtaatccaaagtatatatgtaccaactgatacattttagagggaaaaatgtttgaaaagagaaatcagctcctaaaagatacatacccaagaagaggaatcagtactttggagataaatttagcaaaacgttggcagagacttcagatctgtaagcaagggagtgggtcaccatttggtagcatcagatttcctcaccctggggcactggtagggcagtttatgcttgagggaaggtcaccagaggacaagaagggaaattatggtccaatggcacccaagggctttgaaattgacactagagtcccttagggggatggagaaggggagtgagggagaaggctggagctggtacaaacgccagggggccttcaaattgagccatagtgaaaacagtccaggtcccagagctggagagacattgggttaaatcctcaaatcgtcacctgctagctttgtgcccttggataagttacttagctgttgttatttgttgttgtcgttgtttgaatctcaattttctcatgaagtcaggagttagcaaattttttctgaaaagggccagagaataaatattttaggctttacagacaataaatcatggtcacaattatttaactcagcctttgtagtgaaaaaggatccatagacaatatgtaaatgaaagagcctggctgtgttccagtacaattgtatttacaaaaacaggcagtggaccagatttagcctatgggttataggttgctgatccttgtgtaaaagggtcaaaatgcctaatttgcaggattgctttgagtgttaggcatactctttacaataaacgtttggtgcagaataaacatttaatacatgacaactcttataatttggaaacccttgccaagatatttgattttaacagggaccaaagaaataaatctctaatgaagcaatttttgatatctggatatgtctgtataggaatttgtccttttactagaaaaggcatgagttacatcagtactggagtagaagaaaagattgtgtctaagagagcaggctgtgaaatgaaacagagcctggatgcttggtcagtctcacagggccaattacacacaggagacactgtacataaggcccacgatagttttaattttaatttcttttaaaatcagaagagaaatgaatatagcaataacaataacaatgaatatataatgaatccagcccggatcacattcattttataccaacacagtcatgaaatatgatttttaatatttcttatggaagaaggaccaacaaggtcaaaagtacacaggaaccacaaaagtcaccatgtagccttgcagtagcatcattagaactgtcaggatcctatagcttggctgttttgttggctttgcttctttcatttgtgcttttcatgactgaattaataaaaattccatttaaaaatttcaccctgacactttatgttaagaggcagaaggggaaataactttgggttttgtacttttaaggagaacacctttgttgacagctgatgtgagacctcagttcttgtctacttagtttaaaagaatttatatgagagatacacagcaaaggaaatacagcatagggtaattgattgcaaaagaataagaatattttgacagttaagtgcagaaaagacagtacattctgagagaaggaaaattcagggtgggctgcccataaggatgagacagcaaagactggcactggggagaccccctttatgggagtcttacatgattattcataagagggtgggaagaggtgttactagtaaccatgttcttggtggtcctctgggtggacgtgcacagtagctatacatgcttcttcataaatctcgtgtctcattagcatcttaaatctccacccatgggtgtgttttttactattataatgagcaaagggtcagtttgagaacaagtaaaatcaaaatccgcatgctctctacagcggaaagtcctcactgaagatagctttgcttaaatgagctcaattacaatgtgaatgctgaggcttattgtattgactgtagggtcaccagagttactgcctcctgagaacactgttacttccttgactacctaacctgcctcacctttaaggatttagtcttagtttttgtatttctatcagccttgaataagttcttatcatttctactatttagttttctcatctataaaatatgcccttcaaggtctcgaccctgtgggttttggtgtgtactctgcctcttactaggtggcttgagtaagtcatttacccccactgtgcctcacattcctgatccgtaagatagggatataaagaatgtttcttcaaaaagttgttttaagagttaaacaaggctgggtgtggtggctcatgcctgcaatccagcactttgggaggcagaggcgggcagatcacttgaggtcaggagttcaagatcagcctggccaacatggtgaaaaccccacctctactaaaaacacaaaaattagctaggtaagatggcacacacctggactcccagctactcaggaggctgaagaaagacaatcactctgaggcaagacaatcacttgaacccaggacgtggaggttgtagtgagctgagatcgtgccactgcaatcccgcctgggcaacagagtgagactctgtctcaaaaacaaaagtgttaatcaagattataatttatgcttttaaactgctagtcccaaactaaattctctcactgctctgtgttattcccagagtctgtctctcaagtttaataggtaagaataagatgacttactccccacatctgtttactggtaatgctcagctggccacttctggaagtttcttcagcagacattcttaactgtttttcacctacaaccacataatcagtgatgattttttataagtcatactctctgggagtgaactaagattgttgtgatacataaatttctaatataatgcttccatgtgagcacttacataatagggtaacatgtgagggacctctatatgaggttccaaaggcttttccaggaggttgttgtgttggactgagtgggtttctcagatctctccaggacccaaagggggtgagtaattggtgacaaggacagggaatcaggcttattttatggttctctgtgtttatagggtcagcagcctctggacccgtgaaagagctggtcggttccgttggtggggccgtgactttccccctgaagtccaaagtaaagcaagttgactctattgtctggaccttcaacacaacccctcttgtcaccatacagccagaagggggcactatcatagtgacccaaaatcgtaatagggagagagtagacttcccagatggaggctactccctgaagctcagcaaactgaagaagaatgactcagggatctactatgtggggatatacagctcatcactccagcagccctccacccaggagtacgtgctgcatgtctacggtgagcaaaatcagttccaatggtggatggctgccttggtgaggtggtgagctccttgacatgagagatgtttaagcagaggctgaataaacacttggcaagaatgtgggagaggggacttctgcatgaatgaaatagatgtagctgacccctgaggtccctgcctactcagagatgttgtaagaagcagcgtggtgcagtggatggctgatatgtgcagtggccatcgcatagatcaaggtcaaatgctggcttctttatttagtcacatgaccttagccgagttatttaatttcttcaagtcttagtttccatatctgtagtggggaggaaagaaatgcctaccttaggaagatttttgggcaaaatatcgatcacatctctttctctacagattacaaccaattgataaatagatgcaagaaggaggggattaaaatatcagcatatttctggtaaatctagacaggagaaatgcttcctttcaattctagaccttggcactcatccagggaagttaaaattatgaaacaatgactcaaacttcttcaagaagaatagctgcttcactcactgagccacagtatcaggaaccttaggggatgggcctccagacttgcttgtaggaggtaggcactgcacctgatccaggtgtgtcttccatatagacatggttgaagggaacagaagatatgtattctgcaggctaactagtcaggggaggaagaaaaagggcaaaacacattttaactgcaacctttaacgtctcaaacccatgagtagagaaaggtaaatgatgaatgtcagactcttaccatctcaccaatgaaccaactactcattctctgaggcaggggagtgagcacagagtagagaagggggccagaagggctactccaacacaattttctcctagagagtaaagtgaactctcatagagagtaaagggaagcctgaggacagagactagggaacctctagaacagataatattagcggacatctaacatgcgttatcacagtgcttgccatgtggctatgcttagtaaatgacagttatattcttattgcattattatttctattatttctattgttgttattgttattattattatatagctatggtaaagcagacctaggtagttctcttttccagatacgaatgaggattctgctctgaattactgctttctctccagtctggagctcccagggagattcaggtccaaggtatccaaggataattcagagaatggagagctataggcagagtttccacctctggttttccttcctctcacagagcacctgtcaaagcctaaagtcaccatgggtctgcagagcaataagaatggcacctgtgtgaccaatctgacatgctgcatggaacatggggaagaggatgtgatttatacctggaaggccctggggcaagcagccaatgagtcccataatgggtccatcctccccatctcctggagatggggagaaagtgatatgaccttcatctgcgttgccaggaaccctgtcagcagaaacttctcaagccccatccttgccaggaagctctgtgaaggtgactgcctctcccctctccacaggagactctgcccaggtcctacaccttcttcagctcctagcccccatgggaacagacactgtatggaaactggaggccgctgggtggtcaccaggctgggaggaaggtggcaggtgctccaagacctgggtcgttttcctgagctgacttttctcccttccctgtgcctccacccattctctgaaggtgctgctgatgacccagattcctccatggtcctcctgtgtctcctgttggtgcccctcctgctcagtctctttgtactggggctatttctttggtttctgaagagagagagacaagaaggtagagcgtgtactatttttgtcctcacccacattcatgtttttctccttcactgattcaacaagcacatatagagctgtgtgccagacttggcatgaggtgttgaagatgcagagatgaagaagccacagtctctgccctcaagaagcatacagtcagcctgtgctccttagttctggagtagagaaagtgctggaggtctttcccaaggacacggttctcccagttccctttccagggctcacttctctccttctcccagagggacatcctgatgtggctcttctgttgatacaggccccacactgctgactctgctcccctgacctgggaggtgatggcctccaactctgaggtccccacagaccagcatcctctagtcaatccttcctatccctgtcagagcccacaaaccacccacaccctttccacaggatcaacccaagacctcgctttactgcccactagacacatggctcctggggaagcctttccctgtctctctccagttgcaccccatcctgtgttcctaaaccctgctgattggtcttctgggctcccactgtccatgtgggtgatggggagggacctaacatcagttgggtatgacttgcagactttgaaatctcccttccctcctggaagcccctctgaaagtgtctttgactttctctacttcccactttgaccaccttgatggagagatcaggaagtgaaatgttgggggtggccaattcatcctgatttgtttagattttcccagttttaacactgaaagtcctctatcctgaaaacccttccattacaaggaaactcggctggttggtcaccctaagtgggtcatccaggagaaatggtgggccagtggaagtggtgagtggttggagaggtggctttgattctctcccaacttgcttttagagtacattgaagagaagaagagagtggacatttgtcgggaaactcctaacatatgcccccattctggagagaacacagagtacgacacaatccctcacactaatgtgagtcccttctcatctttcctgagaactgatcctgtctctgaggctctccttgtgaggtttttccatgggtttggacaacatgggaatgaagaggggagtgaggatatatagacttaaaactcaatgcacctgtgcctcctccaagtcttcatggattctcttctgtgcagaagaagctggtggtctctggagcacctggttctgactcacaatgctcatgctgtggtctgtgaaatcacctgctcccctccacagttcataacggccacacaaaaggccagattccttttgcataaggcagtgggtagaagagtgtgactttgacaggatgtttgaatcatggtatcagaagacttctctagagatctctctctctctctctctctctctctctctctctctctctctctctatatatatatatatatatatatatatatatatatatatacacacacatatatatataatatttttgaaattcattttaacacagtacagtttaaaaataatgtaatggcttcctgaaaaaagttatcaaaatttattataatagcagtcaccaacaagagaacttcctacctcccttccctgttccagaaccctccttttcctctcacatctcctcccatctctgctttcccctctctggattctgaatgtctctctggccttgtctatgtgattcaggaggtgggtgatgatttcttttgtttgttgtttgtttttaaaagagaacaatcctaaaggaagatccagcaaatacggtttactccactgtggaaataccgaaaaaggtaagaagctttagagcttaacttcatcttaatggttccatttcttttcctgcttcatgtttaggtcaaaatttcttggacccaggtatctcatactctctagaattaaaaagtaccctagtagttccccattccctttgcttagggttatacaagaacatgggggatggaagagaattgtgttttaggaatcgaattgggtaatctggaacaaatagagtaggacagaggttctagatcggaataataaagaaaatcaaaagccttctgactgaagttgcagacaaggaaaaagaccatggcttagattgtgcatggaatgaagagaggaatagctgagaggagagtccagctttctcctgagacaccaggaaactgcaggagggagagatctctacttttctcccatggtccagctatgttacatctgctttgcaccctcccctcagttaaactactaatgcagtagctttaaggcttattccttcacagagtacggttggcagcagtaatggtatctttctgtctcctttttcttcctctcccaaacagatccaaaaagataagaatcattaaagcagtttgcttagtaatagaaaaggttggtttagtgaattattacaactgaacaaggaaagttcagttcattaagcattcagcaagataaatatgcgttaaacttacagaatagtttctctaagctaggggtgattaaaatcaaacagtgggagccagcatgccagccgatttgggttgggtaaccttggaaataaagtttcctggatgtcagggtctccatggacgatccagagccctgctcacctccctcactctactttctttttgtctgtcttcagatggaaaatccccactcactgctcacgatgccagacacaccaaggctatttgcctatgagaatgttatctagacagcagtgcactcccctaagtctctgctcaaaaaaaaaacaattctcggcccaaagaaaacaatcagaagaattcactgatttgactagaaacatcaaggaagaatgaagaacgttgacttttttccaggataaattatctctgatgcttctttagatttaagagttcataattccatccactgctgagaaatctcctcaaacccagaaggtttaatcacttcatcccaaaaatgggattgtgaatgtcagcaaaccataaaaaaagtgcttagaagtattcctataaaaatgtaaatgcaaggtcacacatattaatgacagcctgttgtattaatgatggctccaggtcagtgtctggagtttcattccatcccagggcttggatgtcaggattataccaagagtcttgctaccaggagggcaagaagaccaaaacagacagacaagtccagcagaagcagatgcacctgacaaaaatggatgtattaattggctctataaactatgtgcccagcactatgctgagcttacactaattggtcagacatgctgtctgccctcatgaaattggctccaaatgaatgaactactttcatgagcagttgtagcaggcctgaccacagattcccagagggccaggtgtggatccacaggacttgaaggtcaaagttcacaaagatgaagaatcagggtagctgaccatgtttggcagatactataatggagacacagaagtgtgcatggcccaaggacaaggacctccagccaggcttcatttatgcacttgtgctgcaaaagaaaagtctaggttttaaggctgtgccagaacccatcccaataaagagaccgagtctgaagtcacattgtaaatctagtgtaggagacttggagtcaggcagtgagactggtggggcacggggggcagtgggtacttgtaaacctttaaagatggttaattcattcaatagatatttattaagaacctatgcggcccggcatggtggctcacacctgtaatcccagcactttgggaggccaaggtgggtgggtcatctgaggtcaggagttcaagaccagcctggccaacatggtgaaaccccatctctactaaagatacaaaaatttgctgagcgtggtggtgtgcacctgtaatcccagctactcgagaggccaaggcatgagaatcgcttgaacctgggaggtggaggttgcagtgagctgagatggcaccactgcactccggcctaggcaacgagagcaaaactccaatacaaacaaacaaacaaacacctgtgctaggtcagtctggcacgtaagatgaacatccctaccaatacagagctcaccatctcttatacttaagtgaaaaacatggggaaggggaaaggggaatggctgcttttgatatgttccctgacacatatcttgaatggagacctccctaccaagtgatgaaagtgttgaaaaacttaataacaaatgcttgttgggcaagaatgggattgaggattatcttctctcagaaaggcattgtgaaggaattgagccagatctctctccctactgcaaaaccctattgtagtaaaaaagtcttctttactatcttaataaaacagatattgtgagattca

SEQ ID NO: 9 - DNA, 2452 bp, Homo sapiens
atcagagtgcgccgtcgtcgccgccgccaccactgtcgccatgaacagtgtgggggaggcatgcacggacatgaagcgcgagtacgaccagtgcttcaatcgctggttcgccgagaaatttctcaagggggacagctccggggacccgtgcaccgacctcttcaagcgctaccagcagtgtgttcaggtgagccctcccgcctctgttcccaggccctgcattctcggcgctgtgtcccaccacactcatcgtattttacggggattgggactggactggaagggtggagaaaagtcgcagtgaggccagtggcaggagctcgctcccctaccatcaccaccgaggccacttgggtgtctctccgaatgacaaatattggggcagtgcttttcaagaagcacagtcacatcctttggttcatttggtgttcaccctaaactcgcaaggtgggcatagttactcatattttatacataaaaaactaacacccagaaataggaagtgattaatccgagttcactagcatcaggtttccttggttctttcgcaggtggtgcacttttccactattactgctggggtctgggcgggattatacttcagaattcagactggagggtcacatttttttgttgttataaacccttcgttagcctgtttctctctcttgaccagtccccgcaactgcagccaggaaatgtttattctggcccaatggatgtggaactgctttgaattgttaagaacagcaccgggcaaagcacttccaataagttaacccaacacatcctcacagcaattccccgaggtagttgctgtcttcatcccatttacagttagtcacatagccagtaagtcctggaacccagatttgaacctaagtctttcactaacacaaagtgatgattatttttcaaatttcacttaattttaacggttccctcacaactccttttccagtctccctcaggtcttacacttgatttattcattatggtacttctggtttttatttatttttgaggcagagtctcactctgtctcccagcctggagtgcaatggcacaatctcagctcactgcaacctccgcctcccaggttcaagctattctcatgcctcagccacccgagtagctgggcttacaggcatgcgccaccatgcccagctaatttttgtatttttagtataaacagggtctcgccatgttggccaggttggtctctaacttctggcctcaagtgatccacctgccttggtctcccaaaatgctgcgattataggcgtgagccaccacacctgaccggtacttgttttttaaaaagtatgtggtttgaatcatggttataagtctttataatcagcttgattttacttttgtactgtcatattttatttacaaagcttgcaacttaagcttcatgtaggtctttataatgtgttttctcctcctaccagaaagcaataaaggagaaagagattcctattgaaggactggagttcatgggccatggcaaagaaaagcctgaaaattcttcttgaccttgacagtcaccttgaaggatttcgcaagtccagaaattgaggactctggatttttgtcaactaactctgtgaacatagccatcagatttgatgaggaacttaggagagaggagttttatttcctccttcgatgttttcctctcagttgtaaaagatgaactctttgagatgatttctcacctgctgtggtatcttgcaggaactgtgtgctaaaattgaacaatttttttgagattatggttgcaatacttggcgtggaatcagctttacataaatataccttgtatgcaaacgatgataaactagtcaggatgagcagagctgcctgacctcttgatttctgctgcaaaagacatatacactgtactggggtcactatttatgaaagcaattggttaggacctctttttttcctctcagggaactaatgctctgaaaagggatctgggcacaacagtttcagtgagtgcttttgagcacacttttatttttatatagtaactaatggttaagattgatggtggcctggattagcaaagaggaagacagcttttaacacagttccctgccttcacaagaggtgtcagattaagatgtgaaagctgcaagaatgttgcagtgaacaccatttcagagctctcagtgtgcagttcaggaattaagatacttggaatagctgtggaggaagaacctaaattgcaaagatctgctattgccagctctcaacccaagtcagtgaattgtcaacctgcatatcctaaaaatgtcaaaatgctgcatctggttaaatgtcggggtaggggggaagctgaaggtgctcgcttcatttgccttgtttactcatcctgccctgtaatgtctgtaatcctgaagatggaataaattgtaacatttagtttctatcatta

SEQ ID NO: 10 - DNA, 65743 bp, Homo sapiens
gcggggagggggttgcaaaaggagccgagcggcttctgctcaatggcggaaaagccgccggtgctctgacggcctcgttcccctagcagttgcgggggagtttcctgccggcgcggctggagtctctgattctcagggttcggtggttggaagatgctccagagagacgaggctgcggcggaggaggtggcggcggccgaatcggcaacggcgctagggtggagagaaggcggcatcggcggcggcggcggcgtgaggggccgggcggtgtaaacagccccggaggcggcggtcgagaccccgagggggaagcggcggctgagtcagggtcgcgcctccgttggaaacttgggctgagtaccgcggcgggcgcgagcgaggcgccctagacatcttctccctcccttgcctcaggtaaggccgcccggcaccccgccggaggggaagcggctgaccggccgcgccgccgaggccccgggccctgggcaggttttcgcggtgctgccgagccgcggccggggcctctgtccttccgaatcctcgctgctttccctgctgccgcggagcctaggcaggggaacgccgggcctggctctcgggtataggccccttccccggccgccgcctccgctgggctgaggtctgggagaggcgcagggagagaatgggagtttgctggaacgcctggaagctgactgattctctcttccctccgcttcagtctgcaagcatctctttcacacgaaagcactggggctaccccaagccttggcgcttctcttcctggtgcatgccctgtttgaaaacactatcttttaccattcgtttcctcatcagcttctgccctactctgcgctccacttcacttccttgttaaatcgtctttctctgctgtctatgcgttctaccctcgccttccctccttagtggctttaaattgtgtgtttctcttttcttcgtaccccggcatctcttgcctgtcttccctagcaccatccttttcggatgtcattcctaacagtgaagttcttaattgaaactgccacttattgtcagtaccccaaatctaccggagccccattaagagtatagactgactagccatatgtggtaaatcagtttttcatagtttaagcctaacaaccttgaaaaaattgtattattaaacgtaaagtgtgaaaataacaccgaaaataattttttaaatgaaggactcagtgagtgttggaaatagttatttcttcattttttaaacttgcatgacctctcatatcagatttagcagatctgggacgtttgcccatcttattcggcaaaaaaagtgcttcttaggcgtttgatagcagcccaaattcatcaatattcaatttcttctaagaacaacttgaaaacttttttaaaaagagacgttaataactgggaagttgttttgatagtcacagttaaagagcttttaaaataggctccacatgtttaatgtatcaaaataaagttggcaggcatgttgtaaaaggattatttaggaatttgagtagtcttagtgttatgtagctattttaggaaaaacattctttttctgttaacaaacgtttacaactacggtgatgtgagaattactgaggcttactgtgggattaacacaggaactgtctttatttgagctactgcatggatgaagaagtggtaaattgttcagagtagacagtgtaagtcacagtatgttctaggagatggagaaacatgccatggacgctgaatgttaatagatgttatttcatttactttctctgttgtgcaatagcaaagttcctattgttggcctacttttaaatggggcatttctaagtaaatagtgagacaagttattctaattattatgatagtcttttccaagtgtacaggccttttaaaaatatagttgaagtaatggtaattttttaaggaaatgtttttgtaggtctgccaaatggacagtgtgttgttctaatcgaaattttaaaattaagtatttagaacagaatattttagtccacacattttcagggataatctttattttgtgcttcttctctcaatgccttctttgtctttttttttgtcttaatggttgttgtgttttcgcctcttcatttgtttttgctctcatgaagtcttacaacagtttctgcagtggttctttttgttgctgtatattagcacgagtatttttatttgagctttcatactgtaagatttccccagtttctagtacattatcctctggatttgttgaagtgattgttctctttgaagtgaccagcagagctttcaacaccgttttcttacactgggtgtctgatttctgtgaagactctaggaataggtgaaaggcctttcaatttagtcatgtcagtaaatactgttttatgttagtaattcacctaattactaaattccttaagattacatcatctgaaggaatagtgtagtgtccaagtaactgtgcttctaagaacagctgattcacaggttgacagggtcagaaaaagtggctcttgttgaaagttatcttttctataacaaacattttttatggaatcttttgaattaaaatatgatgctgattatgtcttggcagtcttggaagcttagaattggccacggtatcacttagtgattgtggtgattcattaaaaagaggctatataggccaggtgcggtggctcatgcctgtaatctcagcactttgggaggctgaggcgtgtggatcacttgaggttaggagttcatgaccagcctggccaacatggtgaaacaccatctctactgaaaatacaaaaattagccaggtgcggtggcgcgtgcttgtaatcccagctactcaggaggatgaggcaggagaatcacttggactcacgaggtggaggttgcagtgagccgagattgtgccactgcactctagcctgggtgccagagtaagactctgtctcaaaaaaaaaaaaaaaaaaaaaaagctgtatttcatgaatatttttatatgtaactattttaaagtattttgtgacattacctagcatagaaagtagttaagtagtataattctaactctcgcttttaaaaatgcaacatacagtattttatattttctgtgaaatatgcctttcacaattcactgattttagtaaaaattagcaaacaaataactggtggcatcagaataataaaagtttgtttaatccaaaattataatagcaaaatttattcaagtaatagcataaaatgtgaaatcatgattatggtaagataattttcaggagtatgatattcctgaattttcagttattcttcacactgtacctgatttctttttgtttttcccttgctgaattaatttcagaattggaatgaaatggaatactgctattatattagcagctttaaagttttattgtaaaatgtatcgtatattagcagaattgatggttaagtgtactgacatttcactatgctatactcaaacattgatggtgaaatagagttttgggaactatttaatttttgtagtttgtagttggctgtcataaaatttgcagaatgacagaactgatcatcagcttctagtggctgatctaacaagaacaggtgaagaaaaaggtacatgagcttcataatgtgtattttttctttgtttttgttggtgtttacttacatcaatacattgagttaaaaaaatgggttttcatcttttggattaatttaagtatgctaaagccattttagaatctttacaagtaaaatgtttctaggccgggcacagtggctcactcctgtcccaacattttgggaggctgaggcagatggattgtttgagaccagcctgggcaacatagcaagaccctgtctctacaaaaaataaagttagctgggcttggtggtgtgtgcacctgtagttagctgcttgggaggctgaggtgggaggatcgcttgagccagggaggtcaaagctgcagcgagctgtgattgcaccagtttgctccagcctggatgacagagtgaaaccacgcctctattttttaaaaaattctgatgtgacttaatctctttgtgtccatttgatttgagatgattgacacttttgaacatttccatccatattccttttcttaaagactacctagaagactaacaagcgtggccaggcgtggtggctcacgcccataatcccagcactttgggaagccaaggcaggcagatcacttgagaacagcctggcctggccaacgtggtaaaacccagtccctactaaaaatacagaatttagccaggtgtactggccggccaaaaaagactaacagaccagatactggaatcagcgttatggtgaaaagaaccctttactaaattcttgatgatgttacaaaattttccaaaagtgtaatctatatagtgtatttatttctcagagtatttaaagattttgagatttagtttttagtaacatataacatcctaggaaacataaatactgtacaataacttatatactttttttctttttagttttcttttttcatttcttttttgcccctcgagatctcatacttcgtagttttccttcaaattacagggtgctttatttctcccctttggtttaactttaataacaaccataaacactttacttctgaattaatggtaaaccatgacacagaagagtgcttaaatacatttttttctttttgttttactataactaatcacatctacaatatcttgttattgcttggcataacatataccttttataataatactcttcatggccgggcacagtggctcatgcctgtaatcccagtactttgggagcccgaggttggtgaatcacttgaggtcaggagttcgagactagcctggccaacatgatgaaaccctgtctttaccaaaaaatacaaaaattagccgggtgtggtggcacatgcctgtagtcccagctaccccggaggctgtggtggagaattgcttgtacccgagaggtgaaggttgtagtaagccaagatcacgccactgcactccagattgggcgaaagagtgagaccctgtctcgaaacaaaaataataatactctttgtaataacttgtttaacctcaagaaccttgtagcttaatcaattgtagtattttaatttgttagttcatatattatacatttgacatggtttataacatttaaaacacactttactaatttaaaacttttgatttatcacacagtttaatattaacttgtaaatataaaatggattcaaacttttctcttggagaatgtttaagtatcatcagtattctattttttagctttaaattgattcatttcttgaaaattaaaaatcttaaagtttagaaacataacacttcttggaaaattgttttgcatccttgtgaacaaaagaagatccagttaaatccgatctcatacttagaggagacagacaaactttggaagccatgtattgactattaaggaacttgtctttctcttagagatggtaccaattactggtagtgatatagggaggataagacttgtctctaggattgctgtgattattgtctacgtagaatggccttcacttcagaatcagttgtgaatgaaaagtacatttgtgtgctagaaataggaaaaaaccttgtcttttatagaaaacttttaaaatgcagttatgttatcaggtagattcaaacgtataatatacaagaaaataaaacaaatgaataagtgttgtttgccagagaagaagcagttctgatcaataatatgtagagtaatttgtaagagtttgaaggcttgcgaagcgcttttaagcctgagagtaatgtcaactcatttttaaatctaatcgcattttattttcttgattgtaggtatcaagagcactcctcgcattgaaaagggctggttactggatgttcttatgagtaggagaatctagaagtgtcagcatgggtgtttaacctatttgggcagtgtttttccttttccttgttctgactaaagcatttatctctgaggtggggaaatggcattttctgttgaacacaggtggcctttcttagtcccttaaaaagaggacatgactgggcctggtggctcacgcctataatcctagcactttgggaggccgaggtgggcggattgtctgagctcaggagttcgagaccagcctggcagcacggtgaaaccccatctctactaaaatacagaaaattagctgggtgtggcggcatgtgcctgtaatcctagctactcaggaggctgagacaggagaatcgcttgaacccaggaggtggaggttcaacccagctgaaatcgcgccactgcattccagcctgggcaaaagtgagactccgtctcaaaaaaaacaaaagtgggggtgggggaacataattaattcaaagcactccaaatgttaagattatataggagattttgttgagctttgggaggctttctgcttttatttactctgagctaccaacccactgagaagtaaagaattcagaacagtctaatagtatttagtctgtaaccctccagccaattcttatgttcactgagtgccttctgtgtgcaaaggcccccatttcatgccagtatctgaacaaaacagacaaaatcccaaatccttgtcgttgacgatcttgcattctgttaaccagcaactcacagtttacattacagctgaactccttatgtggctggcttaaaaacttgagtggaagatttggggtgtgtgtgttttgtacactaaacttaaaagctgtgattagagctttactatttttaacaaaaggaaaggaagaggttttctgtaattggataaaaactagactgaaaagaggaaagaggaaatattgttgtgccttagagaaagacattggtttgagattttttttttttttttttgagacggagtctcactctgtcacccaggctggagtgcagtggtatgatctcggctcactgcaacctccgcctcccaggttcagacaattctcctgcctcagtctcccgagtagctgggatcacaggcatgcaccaccacacctggctaatttttgtacttttagtagagatggggtttcactatgttggtcatgctggtctggaactcctgacctcatgatccacctgcctcggcctccccaagtgctgggattacaggcgtgagtcaccatgccctgcctggtttaagattaaaagatgacccaaagagagaaaaagagatccctgcattagacagacatgagggaaatttggggccttcaggtgtttccatttactgtacatccttggatagatgagttcctggaaaggaggatgggagtaaaggtggaacaataggagaagggtgaacaggattttttaagtctgatttaaataattgggatatacctataaaatatatgttgtcatttatgtttaaaaagctttctgttcttacgtgagtatagctgaaggattagtggttgaccaatagtgcctggtactgatttgtaatggctacttttgtgctcttagcaaagatggctaatggagccaatttgtctcttggtttattgtgcacaacttggtctatatatttatcactgcttctccttccatagctttgttgtattacttaacgtcgtgcctttgttttttctgcatgtgagatgggcgtattgcacttagatgtgtgaagcaggtgcttaatttttgctttctgttctttctattgctttcctactgaaccagtttggtaaagaggcctcttcttcagtttatacaaacattgcaaacttaagcataaaagatctttcatctttttgttcttattttaatgcttggtggtcttgtgctttcatttatgagtcagtttcatttgatcttcattgctaaagtgaatcaagattgatttttttaattttaaagcaaatcaaccaactggctggggtgcagtggtgcaatctcggctcattgcagccgccacctcccagttcaagcgattctcctgcctcagcctcccaagtagctgggattacaggcctgcggcaccacgcccagctaattttgtatttttcgtagagacggggtttcaccatgttggccaagctggtctcaaactcctgacctcaggtgatctgcccgcctcagccttccaaagtgctgggattacaggcatgagccaccgtgcccggcctagtttcatttttaatgtatttttgtaattctgttactttatcaaaatgctgatatgcaagagaacttgaaattttggaatatattaaatttagtactgtaattcagaccagattcattaagttgttcaacatttggccatctatcttagatttaaaaataaccaaaaacaaccttacttgaatttaaaaaaattatctcttgtaactggttttgtttatataatctaacattttattaagtctttggtggttgctagtcctaaacttaaggaaattgagtttgtttctattcatctgttctggagtgtttggaattgcaatgtgaaagtgaaataacctttttttttttttttttgagacggagttttgctcttgttgcccaggctggagtgtagtggcatgatctcggctcactgcagcctccgccttcaggttttaagtaattctcctgtctcagcctcgtgagtagctgagattacaggcacgtgccaccacgctcagctaatttttgtatttttagtagagacaggggtctcaccatgttggccaggctggtctcgaactcctgacctcaagatctgcccgcctcggcctcccaaagtgctgggattacagacatgagccaccgcgcccggcctacatgtatgtatttctaaatagcatatagtactgttttaagaggtgtatgtacatgaccatatacagaattttttttttttttacaatttgttcttgtcacttaatatttttgcagttctttttttgttctagtcccttttttccatagtattgcatatatattgcatagtattccattgtatgattagaacagttctttttttttttttttttttaataagacagtccggctctgttgctcaggcaagagtgcagtggctcaatcttggctcactgcagccttgccctcccaggctccagtgatcctcccacctcagcctcccaaatacctggaactacaggcgtgcaccaacacatctggctaatttttgtgttttttttgtagagatgaggtttcaccatgctgcccaggctggcctctaatccctgagctcaagtgatccacctcctttggcctcctaaagtgttgtgattacaggcgtgagccaccacaggcagctagaacacattttgtctagtcttttttggaaggacatttggattatttttgtaattttaatcaatggtctaaaaccatttacatgccatatatatatgcgagaatttctctagggagtaaaatggctgaactgtaggccatccttatcttatagccctaactagatatttccaaaattctctccaatgttgctatactaatttatactcctaccagtggtgtattttatatatgtatatatatatatatatatatatttttttttttagacagagtttcgctcttgtcacccaggctggagtgcaatgatgcaatcttggctcattgcaacctccacttcctgggttcaagcgatactcctgtttcagcctcctgaagtagctgggattacaggcacctgccaccacacccagctaatttttttgtatttttagtagagatggggtttcaccatgttggccagggtggtctgaactcctgacctcaggtgatcctcccgccatggcctcccaaagtgctgggattacaggcatgagccaccatgcccagccaaaagtttctgttgttttaatttagtgctgtcctatataaatgtaaggtaatttaaatttttctagtagccacattaataaaaaagacataggcaaagttaattttagtaatgtattttatttaatccagtatttccaaaatgattcaatatataaacaatgaagttaattagatattttgcattcttttaaaaaatattaaatggtgtgattgggctgtgtccccacccaagtctcatcttgaattcccaggtgttctgagagggaccccatgggaggtaattgaatcatggggacaggtctttcctgtgctgttctcatgataatgagtaagtctcatgagatctgatggttttataatggagagcttccctacacaagctctctctttgcctgctgccatctatgtaagatgtgacctgcttctccttgccttcagcagtgatcatgaggcctccctggccacatagaactgaaagtccattaaacctctctttcttttgtaaattgcacagtcttgggtatgtctttatctgcagtgtgaaaaagtactaataaattaaatatttaaaatccattgtgtattttacacttacagcaaatctctattagcattagcctcatttaacattcctactagccccgagtggttagtggctactataccaaacagcaaagctctgtgttcttgtctgtgtttgatattgagagtctctctctctctcttttttttaatctaaggagagagaaatggtgttttattttgactttaattttccatcttcctattagttttcctaatgacaaaatcttacaggcataaatatggaattactttgccgttggaatgcaggtgtttattttgttaattgtgtttaagagtttttagatattagatattagatttagatgttagtgtgtctataaaatgatggtgctaattaaagactttaacctggccgggcatggtggctcatgcctgtaatcccagcactttgggaggccgaggcgggtggatcacctgaggtcagaagttcaagaccagcctggtcaacatggtgaaactccgtctctactaaatatacaaaaattagccaggtgtggtggtgggtgcctgtaatcccagctactcaggaggctgaggcaggagaatcgcttgaacccgggaggcagaggttgcagtgagccgagatcctaccattgcaccacagcctgggcaacaagagcgaaacttcgttccaaaaaaaaaaaaaaaaaaagactttaacctcaagtcaactcttaaaatattccccaaaatgtgtatttggattgaaatgaatgcttggaaggacagtacttgaatggcaataataggggtaggaacaaggcaattgcttaatacttaagggaaacaatcctttgtatgtatttcttttccttcatatatttctccctttgttttgcttaatcttgatctttctttcctcacttaggaagagttggctgaatggatctgatctagagccaaagatgttctcaaaaagggctacagggatagactgactttgggagttggggatactctatgcccatcatcaggaaacaaaccaagtaatataaattcattagtgtgtcgtctgtccacagtaagtaggtgtaattggctaggtgatttaaatgaatcagcagaaataaaattgctggaaatcaaggactgcttgtacttagtaaatgttgcagtggataatagaggttaatcagcattccaatagatttttaggtctctgccaatttaatatttctgggaatgttgaaaaatttaactaggacattctttcttgaagaaggatctttttaaattacttttgtttttttttgagatggtgtctcactctgttgtccaggctagagtgcaggagtgtgatcatatctcactgcagccttaaacttctgggctcaagctatccttctgcctcagcttctcgaggagctaggactacaggcgtggggcaccatacctggctaagaagtgtcttttaagttaacacatattttatttagtacctactagatgccaaggtcacgaattagggtgggaaaggagctaagaagagcaaaaatgttaaaaggaatccaaatgattttataggagtggtgagatggtggtaggaagagttgggatgacatcaaggtggaagaagtgttttgttttgttttggagacagggacttgctcttttgcccaggctggagtgcagatcacagctcactgcagcctcgatctcctaggttcaagcagtcgtcctaccccagcctcccaagcagccgggaccacggatgtgtgtcaccatacctggctaatttttaaattgtttgtatagacagagtctcagtatgttgcccaagctgattggtctccgactcctgtgctcaagtgatcttcccattttggcctccagaagtgctgggattacaggcatgaggcaccatacccagcctaggaaatattatttcacaggcaccttgaaggatttggctagctaaataaagtagaaaaaactgactgtgaggtgggaatgaccatgatgaagttgagctgtgtagagcctaggcatgacaaattagagaaggttcttgataagggtgtaaaaaaccactgcatcttttagggacatttaaggtgtgttttagggaaatgaagctcatgataatctgtaggtggattagaggaagatggggttgaagtcagggagatccactaggaagaagttagataatcaatgcattatgtgatgatgctaaaattaggatggtagggtgagagagacactgaaaaacaagattgatggaacatagtgatttaatggtggttgaatatatatcaaaagatttatggcttctgtcctggattaatactagaggaatgctgttactaatacaaataggtgggtaggcatatgaaggtggcttgggtgcagagatgaagtttttgattatgttatatttgaagagagatgtagcataaccaagctttgtgtttaaaatctagactaaaattcatctgaagtcagtgtagacatagcttaagccatgagattgcatcagagggcagatactgtgttttgggttgaaggttaattattatcttgggaccccacttccctttttcagagggtacagaaaaaagaataaagaataaagaaaaaagaataaagtttttttgatttgagagtgttttgaaagtcaacacaactgttaagagtttccagaatcgaggcgttaccaatagtttgaaatgccacaaagtaccttattttgagaagcttcttcttacgactgatagttggctaattctaccacacaggacatcagtgtttgagctgtttggtcaggaatattggtgttttgggttctgaaatggctgtatgttatatcgtgagaaacattctctatggacgatactccagacatatgggaaatactagtaatttcttttttttcttaatttttatttatttatttttttgacacagagttttgctcttgttgcccaggctggagtgcaatgacatgatcttggctcatcgccacctccgcctcctgggttcaagtgattctcctgcctcagcctcctgagtagctgggattacaggcatgcaccaccatgcctggctaattttttgtatttttagtagagatggggtttctccatgttggtcaggctggtctcaaactccccacctcaggtgatccacctgcctcggcctcccaaagtactgggattacaggagtgaaccacagtgcctggccaatactagtaatttataattactttgttcttgattacctaatatttaagttttctaattgtgatttgcttttctttttttacttttctctttagtttgttttgaaataataggttacaggtttcctctgtttagtaggcactttttcctagttatgctttctttgactctaggggctttatttttcatactttttttctttcttataattactttgtgtagaattggaccgtgatgttttcctgaacttttaggaaggtagggtatgtgtggatttttttgtaatttagattttcttcttagcagtttttctttagtgtagagcttcgtctaacaagggagcatttatttcagagtttatgggatctagattgctccagcactatcagatcttgttgtatattggtccctttgcatgaccccagcagttgggtcttgcagaattccctttcagttttagctgttactagattatcctgtcacacttttcagtgagtagctattggtgatgttggagtttctctcatctcaggatcttcagaagcctgttttccttttgcttccttttgcacaaatgctaataccacttgggtcttataacagtttgtagtttatgggggaataatacctttgttgttggattgctttgtctgggggaggatattaaaaacctctgctgtgaccaccactaccatcttagactgtcccatgtgcatgttcttaactactgtgttgtattacttgccaagtgacattcgatgaaatcagaccatttagatgaggaatatccacattttgccttgaacattcttcccgtgtggttttggaaacaaatatctgcacagagtaggataagtaagacagaataataggcatttaactggatggagagtcagtctccagaatcaagtacagctggatactgggataaggtttacataagttgttaggtaggcctgaatgacctaaaaccagaggaagccaaaaggcctgcctcctcatcaccacccagtaaagcctaaagcttcagcttctttattacataagtacattgaagggcataccagtgagccccaggaggaagggagagaattagccagagagctttttgacccaactttgagcctgaggatgagatttggctttggaattggactgcatgatttggtatcttagtttttttttcttctttttttcaagacagagtctcgctcagtcgcccaggctggagtgcagtggcgcgatctcggctcactgcaagctccgccttccgggttcacaccattctcctgcctcagcctccagagtagctgggactacaggcatccgccaccgtccctggctaattttttgtgtctttattagagatggggtttcaccgtgttagccagtatggtctcgatctcctgacctcgtgatccgcccgcctcggcctcccaaagtgctgggattacaggcgtgagccactgtgcctggcctagttcttagttttaccacttgatagttgtgtgtctttggcaagttcttaacctcattgtatgtttccttatttgtaatgtagtgattataatagtaccttcctcataggattattgtgaggattaaatgagttcatgcctgtaaatacgttgaaacaattcttagcacacagaaaatgtctgctgctctaataggtatccagtggttgttctttttgataggacattgacctgttagcagcatttgacgcagtttatcacttcctcctctgtaagcacatttttctttgttgtcaggggtaccacactgttggttttcctcccacaactctggttgctgattctcagtaatttttactgcattttttttcgtctcttgacctttaaatgttggagtgctcaagaacttagttctttagtgtcttctctttttaaattatatttactctgttctcaaggggtttaagtggagatttaattatcatataaatgcccccgaatttatgtcttcattcttgatcccactcctgaatgctttatttctagatccaccttcctgcagtatctccactggacatataatagacatctctaactgaacatgttcaaaactgactacttgatagattatgcctcccttcttctcccctaagttgctgttggcacagactaaatcagggattcttaagctggagcccacagacccacatagggatctatcagtaaaattcaggagaatcatgtttttattttcactaatctctaactgaattttaacattttcttcaattatcaatgtagtatagcaatacttttttacttgtcttctttagaagtcagatatttctatatcactttatagttgttgcaggtatcttaaaatattattaaactcaccactacttcagaattatgacacttattagaccggccactagatactgttgtgttagtgaagaagacatgtattactatgccaagttttaaaaaatattttgataatgactttaatattattgggttttatagtaatcctaattattgtatacattttatgcttacctggcttctaaactgttttgcctgtttttacatttcatttaaatggaatcatacattgtatactctttgatttctagtttctttcagcattgttaatgagattcatctaagttcctgcctatagttgtgtcttgtagaatttggaaaagcatgacaagtgacgttaaattaattcctcttgtatgataccttgccctatgttgagaactgctactttaaagttgattaagtggtaattttctgtttttgatatagcctgaataaatacttttcataggtctgcatgtagtttggtttttagagcacactgtatgtattcagtgtgatagattttttttctcagattaaatttgcgactaaagcaaaataccactgtcaacaaagctatttccattttatgaactatatttttcttgttgaaaggcttggagaggggtaagttacactgttgtcctgagtttgaaatttctagctgagcttttgatttaggacaagaaaatctaaattattcttgtatctggggtctctcacttatgatttcagagaatctgatttactgaataaatttgttttcataatcttgctctaatgtagagctatagtttccagcttttggagaattattgaaagtgactagcctatttttatcagtaacatctccttgccattggacctgggtgtggtcaatgccaatgttattcagcaattataatgaaaactgtaaaatatctcttaaacaattattcaagcccttttgaatgtcagttatgattttgaaaatctgaagtgaatgccactgatactacagttcatcagaattgatttggaagaggggaggacttaaataatttaattctgatgatactaagaattggaagaaaggatgtgagctacatgttctgtttctgtgagtttactgatgggtggagttgtttttcttttgcttctcattcaagcagtataggatttgatgcaggtgtttgtgaatgagtatgttctgtaaggtcctggaatggtgttattagtatgtgacttttcaagcatctctttgaacttaagctggttattagattttattactactatcatttattttagcaatgttttataataatgaaagccattaatctacacattgtctaggaacaggctggaagtgaagagtacttggctatatcatagaaatatttcttggtaacactttggagtatatgtggcatcagttaaattttgaagatagaagcacattattttaaatatttcatgtgtacaagctttttttcttttgagacagggtcttgctctgtcatcgaggctggaacgcagtcatatcatctcagctcactgcaccctccacctcctgggctcaagcaatcctcccgcctcagcctcccaggtagctggggctacaggcgcacaccaccgtgcccagttaatttttgaagtttttttttttatagagacagggtctcactatgttgcccaggctggtctcaaactgctggactcaggcaatccacccgcctgagcctcccaaactgctgggattattggcgtgagccattgtgcctggcctgatttttaactaaaaggtttatacaactatttaatgatttttcatttagacattatcatttgattttctgctatggaatgtcaaaggaattttctgtggtctagttttgttgatgagaagtctcgtgctatttggattcttctttttgtgtagatgactttctagctctactcttacccccaaaagcttaaataaaatttaattgtagtacaaaaagcacataatacaacataaccatcttaaccatttttaagtgtacagttcctatcaggccatggttgctgcaaaaaagaaaaataagcatacactgcagtagtgttaagtatattcacattattgtgcaacaaatctccagaactttttcatcttgcaaaactgaaactctatgcccattaaacaacagcttcccctttccccttctacctccagtccatggtaactatcactctgctttctttttctatgaatttgactgttttagataccccatgtaagtggaatcatgtagtatttgtctttttgtgactgacatgttgtccatgttgtagcatgtgacggtatttgcttcactttttttaaggctgaagaataattcattctgtgtatatactacattttgtttatccattcgtttgtcattggacatttgggttgcttctacctcttggctgttatgcataatatgggtactacgatcatgggtgtacaaatagaaatgtctctttgagatcccactgtcatttttttggatacatacacagaagtggcattgctggatcatatggttgttttatttataattttttgaagaagcgccatactgcttccaaaagcttttaagtttcttttaattcttggccatctgaaagtccataatgatctgtctaaacatgggatctctcccctactctgcctctccgccaagcagtaggctttgagtctgagtatttgtatcttccctcagctctgaaaaattatttttgttttattgtttctttgataatttcatttcttctcaatttctggaatatttggtccagcattgcatttcctggattgaacctctgtgatgttcacctttactttttttttgaaatggagtcttgctctgtcgcccaggctggagtgcagtggtgcgatcttggctgactgcaagctccgcctcccgggttcacgccattctcctgcctcatcctccctagtagctgggacttacaggtgcccgccaccatgcccggctaactttttgtatttttattagagacggggtttcaccatgttagccaggatggtctcaatctcctgacctcgccatctgcccacctcggcctcccaaggtgctaggattacaggcgtgagacaccgcacccagccttcacctttaaattttttaatttgatacacagtccaggagattgctttggcttactttaactttcaaaaaccatcaagaatttttgggttttgtttgtttgtttgtttttaagaagggggatggattgaggcagtcatgtttaaatctgaaaagcagtttttttgtactatgttccatttgttaacatcctgttattctatggaagccagatgaagtatctttttgaatctgaggattctgatttctgatttaaaagaagaagtcttctttgatttagttttttccttctcttctcccagtgtttatcatggctttagtgctgctgagtttctttctttctttcttttttttttttttttttttgagacagggtcttgctttgttgctcaggctggaatacaacagtacgatcatggctcactgcagcctcaacctcccaggcttaagcagtccacccatctcagcctcctgaattggctgggatcacaggcacgcgccagcatgactggttaattttttaatctttcgtagagttgggacttgctgtgttccctgggctggtcttcaactcctggcctcaagtgatcctcctgcctcagccttccaaagtgctaggattacaggcatgagccactatgcccagtttgcctgcctgcctgcctgctttccttccttccttccttccttctttccttccttccttccttccttctttccttccttccttccttccctccttccctccccttcccactcccctccccctccccctacctcctccccctcccgctcttttctttcttttactgggatcacatagcaacagaggaagcaagatagagaggggaggtgccaatttgggttttttgttgttgttgtttttcccccaagcacttcagccttgatcttctgggctaaggtaatcttcccacttcagtctcccgggtagctgggactacaggcatgccgccaccacacctggctaatctttttgtattttttatggagatgaggtttcaccatattgcccaggctggtcttgaactcctgggctcaagtagtccacctacttcagcctcccaaagtggtgggattacaggtgtgagccaccatgcccagccagctgcctttgtttcttcacatgcctcattatccttagctgtttatacttatccttaaatatgaatagagaattcatcttaagtttcttgagaaaagacagaacacttctgctttttgtctgtatgagaggagactggggtcgatggttctctataacttagtttcaccctcattcttacttgcaggcatgatcctattttactacatctgtgaacgtactatgagttctcaaactgtctaggattccctccgcagttctaacttgctaagctgctggtccttccattcttttttatttttatttatttattgattttcgagagcctctgttgccaggctggagtgcaatggcgcgatctcagctcactgcaacctctgcctgccaggttcaagcaattctcctgcctcagcctcccaagtagctgggattacaggtgcctgccaccacgcctggctaattttttgtatttttagtagagatggggtttcgccatgttggccaggctggtctcgaactcctgacctcagtttatccacctgccttggcctcccaaagtgctgggattacaggcatgagccactgtagcctgcccattgttttttattaatcactgcttctatctgctttatggcttccaaaggcttttgatatctctacccattgatggcatacctcttgcccccatttcctgctcttaatttttcattgcttcgtgttttacacctttttaaaatttttcctttactaacattttgatggcatgttgggagggattagagataaatggctttgttccacctgtcttgaactagaaacacttttatcatgtggattatatcgtgtgaatgtgaatgttttcattacaaaaatatttcacaaaagattaagctaccattgggcattgtggacagatcattatttgatactagtagagtggacagatcattatttgatactagtagagaaatttgagtttatttgattttttttttttttttttttgagaccgtcttgccctgttgcccaggctggagtgcaatggcccaatctcagctcactgcaacctctgcccccaggttcaagcaagtctcctgcctcagcctctcgagtagctgggactataggtgcccgccaccacatccagctagtttttttgtgtatttttagtagagatggagtttcaccatgttggccaggctggtctcaaactcttgaagtcacgtgatctgcccgtctcagcctcccaaagtgttgggattacaggcgtgagccactgtgcctggccaagtatatttgattttgagaaaatattgaaacttactctcatgtctttttttcctgtatcactttttgaagcttttctcccctttgcttgttcttactttttaaggcatttttttccatttcttttgaaagtaattttaaagaactctaaaaaaatttagtaggcagatacatttaaatgagttgatcttttatttgtaagcgttagaccaggcgtctgttaaaacagaagtgacatttattttggctaaacagtttctgttctacatatgtgtttacattgcattttcacactccataaattgaacagcgcaagtacccatatttttgttgactaagttttactgtaatatttatcaaggaaatgggtatttaatgaccatttaataataaaataaattgtacaattattgtgttgaaataagattttactgagacatgaactgttgttatatcagtgtgtgcagcttatttgaatagtcttgcagcatgaacatttttgcttcttaacataaggatccatgttctcatcactaagatttaacagacattaacattttgctgtttgcttcaaattgatctcagaggcatgttaaccaactttaaatattgccacttcactatttccctagaagtaagtactatcaagttggtcttagtagttttagtgtttatacaactcaagcatgtttttaaatacttttgccacatattcatgtatgtaaactaatctgttgctttgtaaattttatttgtttttgtttttgtttttttgacacggagtctcgttctgttgcccaggctggagtgcagtggagtgatctcggctcactgcaacctctgcatcccaggttcaagctattctcctgcctcagcctgccgaacagctgagattacaggtgcccgccactatgcctggttaatttttttctatttttagtagagatggggtttcaccatgttggccaggctggtgtcgaactcctgaccttatgattcgcctgcctcagcctcccaaagtgctgggattacaggcgtgagccaccgctcccagcttctgctttgtaagttttataactttgcataatggcatcacactgtatgtatcattttccagctactttgttttgatttactcatggtgatacaagttaatgtagtctatacttttaaattctgtagagatttacattgtatcagcattattgtatgcttctgcttgtatatatgtgaaaatttctctgggtggatactctataaccaacaattctccaggaaattatatgcatttttattctaccaaatatcactctggagatttctcatgctgtttgggttcctaattctttatgtgtgacttattttttccccttttttccctctgggaaatgttaggttttatctttatcaccagtgttttgaaatttcagttgctttttgtgtctctgtatgtgtgtgtggttggttctactttcagtcctgacacttagggtgtttagttctctttccttttcttgttctttctctaatagctgttagtttcaggactgatcctgcagctttcttagttttattctttactactttgagtctgtttggtttttgtgaaggggaggggtctgggggattttacttttgattttttttttttcagtttgattttctaaacttttattgacaattttctgtcattttaattatttttattttatgttatgttatgttatgttatggtattgtattgtattgtattgtattgtattgtattgtattgtattgagatggagtttcgctctgtcgcccaggctggagtgcagtggcacgatctcggctcactgcaacctccatctcctggattcaagcgattttcctgtctcagcctcccgagtagctgggattacagcccacaaaccatgcccggctaatttttgtattttcagtagagatggggtttcgccatgttggccagggtggtctcaaactcctgacctcaggtgatttgcctgcctcggcctcccaaagtactgggattacaggtgtgagtcactgtgcctggcctgtcatttttatttttaaaatgttttctttaacttgacattataatcttacatatgtattaggtataaaatgatgttataacatatgtatgcagtgtaaaatgattgaatcaagctaatgaacatatctatcaccttacataattattatttatttcacctgtctaaccacaactttctatcctttgaccaacatctccccattttgcaccaccctcccagcctctggtaactaccattctactctctgcttctatgagtttgattgttttagatgtcacatgcaagtgagaatatacaatatttgtctttctattcctggcttcttttacttagcataatatcctccaggttcatccatgttgttgtaaatgacagaatttccttctttttttaaggctgaacagtattccattgtgtatatatacaccacattttctttatccattcattcattgatggacacttaggttgattgcataacttggttttggtaaataatgccacagtgaacatgggagtgccgatacttcttccacatactgaattcagttccttagggttatatacccagaagtgggattgctggatcatatggtaattctggttttagttttttgaggaatagatagttgtccagaattactgtaataatttacataaccaccatcagtgtacaaaggttcacttttctccatatccttaccaatacctgttatcttttcctaatagccattctgacaggtgtgagatgatatgtcattgtgcctttaatttgcatttccctgatgattagtgaggttgagcattttttcacatatctattggccatttgtatgccattttaatttcaaaaagcacttttctttcctctgaatttttttattttgaaaaaaatttttttagagacatgttgtcactctgttacccaggctgaagtacagtggcccatcactacagtcttgaactcctgggctaaggcagtcctcccgctgtagcttccctagtagctaggactacatgtgcttgctactgtacccagctaattaaaattttttttcttttttttttttttttttttgagagacagagtctcgctccattgcccaggctggagtgcagtgctacgatctcagctcactgtaacctctgtctctcaggttcaagtgatcctgctgcttcagccccccagtagctgggattacaggcacgtgccaccatgcccggctaatttttgtaattttagtagagatggggttttaccgtgttggccaggctggtctcgaactcctgacgtaaggtgatccacccgcctcggcctcccacagtgctgggattacaggcgtgagccactgtgcccagcataaaaaatttttttttatagagacagagtctcactttgttgtccaggctggtctcgagctactggcctcaagcaatcctcctaccttgaactcccaaagccctggggttgcaggcatgaactactgcatcacccagcctggttttgtttatttgtttgtttgtttgtttgtttttaatatctttttggttcatgaatagaatacttttttatttctcttaaggatttttttttccctagtccttgcatggttttttccttctgattcctttttctttgtttgatttattttgcttttcatgttgtatgtttcctttcagtatctggtaatctttggatagctcctcatatttaagtgtaaccctgacagccttgacagggatgtcatttgataggcctcgctgtgggatgattgtggagaccaagcattttatggagtattcctgtgtgtaagtaatctgtgggtactttctctgggactagtgaatttcctcagagagcaatagagctgttgcctgcttgtggtttccttgatttctgggagttggtaaagaaggctgagcaggccgggcgtgttggctcatgcctgtaatcccagcactttgggaggccgaggcgggcggatcacgatgtcaggagatcgagaccttcctagctaacacggtgaaaccccgtctctactaaaaatagaaaaaattagccaggcgtggtggcgggcgcctgtagtcccagctacttgggaggctgaggcaggagaatggtgtgaacctgggaggcggagcttgcagtgagccgagatcgcgctactgcactccagcctgggcgacagaggaagactccatctcaaaaaaaagaagaaggctgagcaggctgagcatatcagcattcattatgcaaatttatagtttatatcactggttttctgtaaggcttcttgctctggtcctcagctaaatctgctgtctctaaacccagagtctctatagttcactctttgcaagatagacctccagtcttttgcttttttttttttttttttgagacggaatcttactctgtcacccaggctggagtgcggtggcgcaatcactgcagcctccacctctcaggttcaagtgatcttcctgcttcagcctcctaagtagctgggatgacaggcgcttgccaccacaccagggctaatttttgtatttttagtagagacagggtttcaccatattggccaggctgatctcaaactcctgacctcaggtgatctgcccgtctcggcctcccaaagtgctgggattacaggcgtgagccaccccacctggccttttctttctttctttttttttttttcaagagacagggactcactgtgtcgctcaggctagagtatagtggcatgatcatagttcactacagcctcaatctcttgggctcaagtgatcctcctgcctcagcctcccaagtagctggtgctgcaggcatacgccaccatgctaggctaatatttttccccaattttttttggtagagatagggtcttgctatgttgcccaggcggtcttgaactcctggcctccagtgatcctcccagctaggcgtcccaaagtgcttggattccaggcatgagccaccatgcccagcccagacatgtattaaaactaccaaacaggccaggtgtggtggctcacacctgtaattccagcacttttgatgtgggaggattgctggacgccaggagttcaaggctgcagtgggctatgattgtaccactgcactccaacatgggtgacagagcaagatcctgtctctaaaaataaaaaatacatgtctgcaacctatttagtaatcttctcctttgagtggtggggtctacgttcctttgtcttcaatctgaacaagacttagtgactttcttgtaaccaataatgcagcagaagtgacttctgagggtgggtcagaaaataccatgtagctctgcctgggaaaccaggtgacatgtaagaagcctgaccgtgttgaaatcctcaaactggagaggccacatacagaagatactccttgggacagtctcagctaaattcctagccagcatccctcatcagctgcctatcatgttaagtgagctttcaggtgaccttctccccagccagtatttgtatgcagtaatatgagaaaacccaagtgagaactgtccacttgaacccttacaattaatgagccaatactgatacattgttaactaaagcccataaagcccattctttatttgcattttcttagttttaacctaatgtcctttttctatccaagatcccattaaggatgtaccacgttacatttagtcatcatgtctccttaggcccctgttggctgtggcagtttctcaggctttccttgttttttatcgccttgaaaattttgaggagtactggtcagatattttgtaggatatccttctattggagtttctctaatgcttttcttatgattagactggggttattatggattttgttttggaggaagaccactgaggtaaagtgcctttctcattagattatgccaagaatataaaccgttgatgtcaagtttgattacctggctgaggtagtgtttgtcagatttctccactgtagagttattctctccctcgttttcattttgtactttttgaaaagaaaataactgcccaatccacccttatggggtgggaagttgtgcttgacctatttgaaggtggaagatctacataaactgtctggcattcttctgcattaaaggtttgtctggtatccccattcatttacgtattcagtcctttatttttatcagcaaagactcatgaatgtttgtactatgggttataatccaatattacgttattttgttgctcagattgtttatccattaaaaaagaaaatgatctgtcatagaccaagagtggttataacatctcagaaatagaatcactggatcggaatttccaattattatataatcttggtatttttaggatacatttctaagccaccttagcatgtttggcaaaatcacaggtggagagattttccatagccagtctaccttgcttgtactacactgtacttggaatgacttaactgaggcttaccttttagttttcattttttaaataaacttttaatgttgaaataatttcagatttacagaaaagtttgcaaaggtagtacagagtcttccccatctaccccctacccagtttccactaacgttaactttttttttgagacagggtcttgctgtgtcacctgtcataccactggagtgcagtggtataatcagggctcactgcagcctcaacctcccaggctcaggagatctcccaccccagcctcctgagtaacccaggctacagccgtgcgccaccatgtctggctaatttttaattttttgtagaaatggagtctcattatgttgtccaggctgatctcgaactcctgggcccaagtgattctcctaccttggcctcccaaagtgttgagattacaggcatgagctaccacacttggccactaatgttaactttttgcatttactgtagtgcgtttatcaaaaactaaaaaaaactaacattactcttctgttaactaaactctagtctttggatttcaccagtttttctagtaattctgtttatctgtgtcagtatccagtcagggatatgacattgagttgccttttgagcccctgaacatttatataactattatttattttttaaaaggaagaaaaaagcttgcgatacattagccactgaagcccagagtttgagaatgcaagatttaggctagtcttaataggttcgatttctgattagccacttagttgtgttgtctggataccctaggtatcccagttttctcaaggtaaaatgagaatataaatagtgctaaccttactaagttgttattagaattaaatgatatagtgtatatcagtatcttagtgtagtgcctgacatatagaactcattaaaaaatgaggcattgttatcgctatttatgttacttttctagtcgaaagagcaacttactagccttcagaaacctttgggaaaaattttatccatgagcctgaagcatccctaacaccaccgcattttctttgataggaagcagatgggattgacagattgtgctgttcttaagccacgcttgccaatgtccatgtgccccctctaaaaaagtgtgccaagtgcagtaaggaggagaattttgaagtatttggtcgtcttttcttgaagttttatgattttttgtttgtttgtttttgagacggagtcttgctctgttgcccaggctagagtacagtggcacgatcccggctcaccacaacctctgcctcccaggttcaagcaattctcctgtctcagccccccgagtagctgggatcacaggcacccaccaccatgcccggccaatttttgtatttttaatagagacgaggtttcaccatgttgaccaggctggtctcaaactctttgcctcaagtgatccgcccgcctcagcctcccaaagtgttgggattacaggcatgagccaccgcacccagcctgaagattttttattaaaggtttccctgataattgtttgcttttttgatatttgtttttctaaagagtagaatttaaataagttaatgtttgtgaagcatttaagacagagcctaccacagaacaggcactacagaagtatttgcttgttccttggtccctcaaataagataaaagcgtaacataatgtgcctctgttacaaaaatgaaacgaaataataagaggtacgagggccattaactctctcagattacttccctggttgtctctgcaggggcttggtttcggaccagacctatgtgcagtctgccccatcatgctcttaagactgttgaagattcttacttttggtcatagggctggtaaaagtgcaggtagtgtctggcatttgtaattactagggaataaagggagaatgaattagtttaagcagttttttcactacgtattttgcagttgaaaatttcattacaatcacaagtatcccatatatggctactaggaagaaatggtcatggccgggcgtggtggctcatgcctgtgatcctagcactttgggaggccgaggtgggcagatcacaaggtcaggagttcaagaccaatctggccaacatagtgaaaccccatctctactaaaaatacaaaaaattagctgggtatggtggcgcgtgcctgtaaccccagctacccgggaggctgaggcaggagagtggtgtgaacctgggaggcggaggttgcagtgagccgagattgtgccgttgcactccagcctgggcgataaagcgagattccatctcaaaaaaaaaaaagagccgggtgtggtggcacgtgcctgtagatctcaaaaaaaaaaaaaataaaaataaaaaaaaaaaaaattgagccaggtatggtggcacgtgcctgtagtcccagctacttgggtggctgaagcaggagaatggcttgtgaacctgggaggcagaggttacagtgagatggcaccattcaacagagtgagactgtatcccctcaccccccaaaaaagaaagaaaagtgatttagtaaatacagccaacaattctgtttcatttgcatttaagtatcttttaaagttgcctttcagatgaaatagcctatacaagcaagcatataaaaatgtacttagaactaggctttaaaatcattgtatcacagagaattaaaccagcatgttcaaaagtaatcaagcatattctgttacattgctctcagtacaaaatatgacattctactgatagaatgaaaaataatttttacatgattttaatcttatcctttcaggactctttttctataaatacatttgtaatttattaatacagtatcacatataacccaggaaaattataaaactggtatgtaacttataaatatttacatatatatatcgagtggttcatcagatttttttaaatggcgatatgtaattttattgtaaagttcaataatgatcatacctggaaaaaatctcacaaagatacgtagacccaaatggaggtaaattgatctagaccagtgtctctcaaaactttaaatcaccagcatgcttttttgatgattccatctaagatctattgaaaaaaatccttaggtgtgggaatagggctatggagtctgcattttgagcagatataacagcaaacattttatggtgtttattgtgttttaagtgctgttttaagcactttacattgactcattcttcacagcagccctatgaggtataggtacaggtgactaagaaatttgcccaaggtcacctagttagagtgtagggttagcattgtatgtagaaaacataccagagaattcttttgcatacttttgggaaccattactctaagtctaatctaagtcatttgaaattgggaaagctttattctataaaatagtaaagttgggtaggcggggagagggtgatgcatagtagtactttccaattctaaggattttaagtctttgtcagtcaacactgggtagctacttcatggattttaagttcagcaaagtgaagtccattttttagcaccatgttaaaggtatgtttttaacagaatcaaagtaatgataaggttttcagttttatagatatatagtaaaagtgataaaaccaaatgtgtgtagaatggagatttttatgttttaattgaattttggggttgtctttaggttcactgggaggagaaatcttgatttcaatacttgcttttgaaagtcttctaaagtatattagtataccttcctaccttgatttattgaacaagatgactcactgttttgaatattctcattgtccagtcttctgtaaacttacatgtcgaaccctagactcaccttgtaaattaaatcagaatgaaattattaatgaagttttatttcttgttttttcctttctcctagaacagtggtctcaacgtggctgcacatacaagtcaccagagaggcttttaaaagatgatatctgtgtcccatccctagggattctgatttaattggtctgattattcttacgcgctagggctgagaaaccactgttctgtaggatgtaggggaggaaatttcttgggcttttgttgttgctcccgtaaattaggataatactaaaaaaaatacttgaggtaggagttactagactatagagggaatattgtacatacattttctgtcaaatttaaacatttaacacctgcattttttatttcagatttattgctaaacatgggtgcatttttggataaacccaaaactgaaaaacataatgctcatggtgctgggaatggtttacgttatggcctgagcagcatgcaaggatggagagtggaaatggaagatgcacacacagctgttgtaggtattcctcacggcttggaagactggtcattttttgcagtttatgatggtcatgctggatcccgagtggcaaattactgctcaacacatttattagaacacatcactactaacgaagactttagggcagctggaaaatcaggatctgctcttgagctttcagtggaaaatgttaagaatggtatcagaactggatttttgaaaattgatgaatacatgcgtaacttttcagacctcagaaacgggatggacaggagtggttcaactgcagtgggagttatgatttcacctaagcatatctactttatcaactgtggtgattcacgtgctgttctgtataggaatggacaagtctgcttttctacccaggatcacaaaccttgcaatccaagggaaaaggagcgaatccaaaatgcaggaggcagcgtgatgatacaacgtgttaatggttcattagcagtatctcgtgctctgggggactatgattacaagtgtgttgatggcaagggcccaacagaacaacttgtttctccagagcctgaggtttatgaaattttaagagcagaagaggatgaatttatcatcttggcttgtgatgggatctgggatgttatgagtaatgaggagctctgtgaatatgttaaatctaggcttgaggtatctgatgacctggaaaatgtgtgcaattgggtagtggacacttgtttacacaaggtatgtaaacttttttgtcattaaaataacatgttaattttgaaaagttacggtaggtaaagttaagctaacttaaaattttaaaacttttaatattttcacagaagctgtatattttgaagtactttaccagaaatgaaaccattgttttctttgccatccttgtttgtcccagccttctaatttgaaaattaagcttgataaatttgaggcatttgttgtcatttaagtacttcatagcttgttgctgtagcaaaagcatttacacagagtgactttttcttgacattggcagtaaccatcttatgcctgattatgaagcagcttgataaaatatgtatatagtagaattctgtactagatattactaaaagatcaagagccatgtgaaatattggaagatgtactagatgcctagcctgtataaaatttagtcctgagcctcctagcagtgaagacaaaaactgaaataaaaatatgggttgtatatttctcattgtcttctaaaagcagctcttatctggcaatacaatctaaaaaggatttacatgtggctctctaagtaatacatgacttggatagtatcttttgtagaagataaaattcttttcatatagatgtttttattatttctgattaaaaaccaaaggcttctataaaacataatcttgtgaaaaattcctgtggaacactaaagtttatttagatttgtaattttgtatgaatcattgcttgatacagtaatagaaaaaaagtccagagtaatagataattggcaatcctttgaatatctttaaaatactcagttgtttcaagtgggtttttgacagcatctatatataattcaattaaaatttgagttatctggccagtgtctggagtgtgtaagtatttgactgaaaagataccaaggtaaaactgacctttagttacatgaaataaataaagggtttgacttatttattctgtctagattagaaccactgtatctccctactccaaaatgtactgtggaaggtatgggcataaccagaaagtttttcagaaaggatctctgggtctctggaaatgcccagattttggttaaataccgatttctttttaatagaatggaaagaggcagttttaaaaacagaagatttaaaggccgttcttgtcagtggacagcctttttctgaaaggattttaatgatggtacctctagctcctctgatttttatttttaacacactgtatctttttacttctggatgagttaagtaaagaagtattgatggttgtcagtgatcaaatagtaagtgggtctaaaattatgtatttgtctttgaactctaaatgaagcaattctgacctgtagatttttgagacaagcataggcatatgtttgttgcctgactagctaatgaaaacagcattttccccaattataaaaaaaaggtatatacttactattggaaaaaaaatccagatgatgaagaaaatatagagaaacacccaaaattttgccatccaccctaagtcagctactttcattgttgtggtgtatattgttccagtcttttctgcctgcctgtgagtgtgtgtatttttataaaaccgagatgattatacttgttattctacagcctgccttttccaacaatatattgtagagagatctccatgcctataagtattgatctgtatcatttttcttggctgcgtagtattttattgaaagaatgaggttgtgagggaatagccaaaaaatctattaggtctgtaatttggactaaggaaagaagtttgtgttagtagattaactcacttatccattgaaaggatgctagtttttgagaattttgactcgacccttctgaatgaggtttaaatatttctggtggtatatcttcacttgctagcttttatcaatttagagtgattaaatgttcatgttgatggtgttaaaagattctagatggcatcctagaatctcagaaatgaggaatgataataacagacaagaagttggggcccatgattcattcaatgttaatggaagctgaccatcatagttccttctaatggagctgcattcaaattgaaatcagtttggaggtttgaattgaaacaaaacagacttaaaattatttttgaacctttgaaagttacttatggaaaccttcatttctgtttaacttcgtaattttgtctttccatttatttgtattgtaaaagcaagggttagcaataagatcaaatataattactttgaatttactcagaaaaattgtaagttaaaaattcatggaaagcacttagcgattgcacagtagttacctgctgtaagaggagaggaaacattaataagtagatgtttccctgataagagatttaaatgaagtcctagttttttctaacacctccatcacttgtcatactttcataatttataagcacttttatcttaactcattaaatcttgggaggttatcataatcataatcgtggtagtattagtaaattattgctttctgtaagccaaacactattctaaatactttacatattttaactcatgtaattttcacaaccatatgaggtagttaagatgacgaggtcaggagatcgagaccatcctggctaacgcagtgaaaccccgtctctattaaaaaatagaaaaaatcggccgggcgttgtggtgggcgcttgtagtcccagctactcaggaggctgaggcaggagaatgacttgaacccgggaggcagagcttgcagtgagccgagatcacgccactgcactccagtctgggtgacagagcgagactccgtctcaaaaaaaaaaaaaaaaaaaaaaaaaagataagcatttttcagggttgccagttaatattaatctgtaagtgttgtatgactgtggtcaggtattatcctatttaaattaggtatttaactcgaggggagaatgggagctaagaaagcaaccctcccattttatttgcaatgctggcatttatggtgtttactgccaactaatttcgggttgcttaaaatatgtaactgccacgtgcatagcttttcataacttgtaaatgatacatacttattaatcctcatagtaactttctgaggtgaacaaaataaaaagtttttttaatttgcaagtaaggaaatggaggttgtttgatattaaaagatatccataagtcatatacttggtgagtattgaggctgagactagttttctgactcaagtttagtatttttgttaacaatatttcccagaagggcctgataaaataaagaagagtgggtgtgggtgtgggtgtgggtgtgtgtgtgtgtgtgtgtgtgtgtaagtgtctgtctgtttcggttttcatggtctgagaaatttttccccaagggaaacattaagactaaattttttttgtaacaaatacagagatgtttgaagtaaagtgattccccttgatgtttctgctttccagtctcatctcacttagggaaccactgctcatggtttgctgtatatctttccaaatggttctctgtgattattgatagaaatgtataaacgtaaaataggattttttctttttttgtattttatagaaaaagatcatgctatgtttgttactttgtcacctgttttgtttttcttaaattataaaagtcggtattcttttaaattgttcttttaaaacattatttgattttccaaaatttcatttatataccatctaccagaagcctatttattttaaaacatgagatagtacctcatagttggataaaattgagggaaattatcattttccaaaggcaacatcattctatattaatttatataacatagaaaatgtaaccccctcaataattgtttagttctaaactcaggagaattgcttgaacctgggatgcagaggttgcagtgagctgagatcgcgccattgcactccagcctgggcgacagagtgagactccgtgtcaaaaaaacaaaaacaaacaaaaaactgtatcagattgttttctgtttaagtttagatgcccttatttatggcaggggcactggcgtctttgatctggtactatgattattaagagtgttaactgctgtgctgttgtaaaaagtaaaaagaacatgtaataatcaatttttatatgcagagctaatttctttagttatccaaactggatttagaaaaaaaaatgttttatttatggacttagtgaaaactttatactgattatacaaggatgttttgtctctaaaaaacaatggcacaaaggaaaggaccttttctgttgctgtataacagctactgaaacatattcatacttggtgtttaggggaaagccatctttacatagaaatagaagcaagccaggcaaggtggctaagaagcaacatcactgaaatcacacatgcctgagatgtaaatataaattatttcccttaaatgtctttggagaaccataaatttattggaactctctttcaattaattttccaaaagtatttatattttataacttacaaaaatcgaatggaaattagataaggaaatgttccacaatgctcatgttgttgttaccaaaaactcaaaagggttaaaagaaattagatttctaaaagtgtaaggtgttaattccgtttatgcataaaattgctttataaagtgtaattatgcttgattctttttttgttgttgtgttttagaaagggtgtctcactgtgttgcccgggctagtctcaaactcctggccttaaatgatcctcctgcctcagcctcccaaactgcggggattacaggcagccaccatgcccagctgtttgattcttgaatatccatggtgtactttaaaattatttttaattaaaaatttttgcttgaactgcccttatgacatttatacaagtatattcatataaccaaacacatacagtatttctaatataaaagttttggtgggtttcattaaggaatgaattaatttggccaatttggaaatggtttttccagataaccgggaatctaatgaaatactcaagttggttccttgttccaaagcacaacaatctgtgacaagttaatttattttgaagtcttctgaagacccaaccttcactgccttcaaactttactcccattgaattaggaggtgaaggcagaagttattcaaggccacctgtcttttgggctgtgtcatgtaggttctgaaaggcataagtctgaaccgagccatgcctgcctagattctagtcataataactgaaaagactagaaagggtgtggtcttggtttctttcacttgagttggcaaatttggcaaacactatcagacaaaatagcctaccacctccactgactttgttttttagagtgaacagaaaaagaaagtttgaaaaaaatcgttattccaagaacagtttcatctgctcctgctcttagaaactcagttaaagtaatatacctttagaaaaagtaatgagaacgtatttttaattgattgcacataatctcatggtactagagtagtatatatgatatgctttttttttttttgagagagagtcttgctctgttgcccaggctagagtgcagtggtgtcatcacggctcactgcaatctccacttcccaggcttaagcgatccttccaccttagcctcccgagtagctgggacctgggactacaggtgtgtgccactaagcccagttaatttttgtgttttttgaagagacaaggttttgccatgatgcccaggctggtctggaactcttgggctaaaatagtctgctcaccgaggcctcccgaagtgctgggattatagccatgagtcacagtgcctggctttatgctttttttttttttttttttggagacagtctcactctgttgcccaggctggagtacagtggtgcaatctcagctcactgcaacctccacctcccgggttcaagtgattctcctgcctcagcctcctgagtagctggtattacaggtgcgcgccaccacgcctggataatttttgtatatttgtgtagagatggggtttcaccatgttagtcaggctggtcttgaacccctcaccttgtgatctgccctcctcagcctcccaaagtgctgggattacaggcgtgagccaccgtgcccagtgtatgcttcctttttaacataggtaatttgtgatggtgtggttaaaagggagaaataaaatatgtccttaaattagctattttagccactttataaagattctgaaactacttgcgactatatagcaatctgatgtcttttcttttaaaagttatcacatgactacagttggatctcagttgtccagttacagtcccccctgttactgtgccctctgaatagtttcttgtattaatagttgtggggctgggcgcggtggctcatgcctataatcccagcactttgggaggctgaggtgggtggatcacctgaggtcagaagttcaagaccagcctggtcaacatggtgaaaccccatctctactaaatataaaaaaattagccgggcctggtggccgtcacctgtaatgccagctactcaggaggctgaggcaggagaattgcttgaacctgggaggcggaggttgcagtgagccaagattgcgccattgtgctccagcctgggcaacaagagcgaaactttgtctcaaatagtaataataataattgtttagtttagtattttgggtattctgccgaataacaattttcagctatgttaaattcatggagtcgtagcattgctctgaggcagtttaaaagctaagctggaaaacatttgcatatgtgtttgggaggatccattgtggacttaagccagtttgggaatagacaatcttgagtgggaaatagtttagaagatttaatatgtattgaagatatcttcatttctcagactggaatggctgtgggtaataatagttcaccagaattaaaaatacagaaatgcttacagatatacccatacctagacaccttgtttcttcaagttgtgtttttagtaattcattggaataaaaatgaatgtgttaaacataaacgttctggatgattaaataaactataattgcttaaagtattttgaagtaaataatagttgattgtagaaatacaattttttttcttttttttctttaatacacagggaagtcgagataacatgagtattgtactagtttgcttttcaaatgctcccaaggtctcagatgaagcggtgaaaaaagattcagagttggataagcacttggaatcacgggttgaaggtaagacaaatgctttttaaaaatatagacaggccaggcacggtagctcatgcctgtaatcctagcacttttgtcgcctgggcgacacaccaaggctctgtctcaaaaaaaaaaaaatttagagagggaaagtattctttttgtttatcaaatgattattttaaaatttcctggtcaggcgcagtggctcacacctgtaatcccagcactttggcaggctgaggcgggcagatcatgaggtcagatcgacaccatcctggctacacggtgaaaccccgtctctgctaaaaatacagaaaattagccgggcatggtggcacacacctgtagtcccagctactcgggaggctgaggcaggagcattgcttgaatctgggaggtggaggttgcagtgagccgagattgcaccactgcactccagcctgggcaacagagtgagactccgtctccaaaaaaaaaaaaaaaaaattccataggacaaacaagtatttcaaaacaagtccttgaaaaaacacatctatctgtctaaaatttactgtcttggaccaatttctggggattgattgacagggagaagacaaatatgtctgtttcaccaccaaagagaaacataatttgaaggtagttcgttagagcttgctggtttattttttctttctttttctttccctgcgtacattcctagtagtaagtggagaatccagtgaaatttcccctaacagtgtcatgaaaacaagtactcttaattccgctaatactaattctcccttttcgggttaattatcattggaattcattacggtatcctttcccttttattgatagagttaacattagtgtttcaaaagattattttacatatttttttaaacttcatttggcaataaatttttttttttttttttttgagatagggtcttgctctgttgcctaggctggagtacagtggcatgatctcggctcactacagcctcaactccctgggctcaagtgatcctctcacctcagcctctcccaagtagctggaactacaggcacgtgccaccacagctggctagttttctttattttttgtaaagatgaggtctcactgtgttgcccagggtggtctcaaactcctggactcaagcagtcctcccacattggcctaccaaagtgctgggattacaggcatgagccagcacagccagcctaataattttaaacatacagaaaagttgcagaagtattacaggatctcccatgtacatgtagtgtcctttacctagattccttatttgtttatgtaataccacgtttggcttatctctatatatactttctgtaacattctcattttctgtctccctccttccttccttccctctccacctctctctcctcttattcccctgccccccatattactaacctttttcctgagccaaatcaattgaaagttgcaaatatgatatatcagtactacttaataaaacgaagattacatgacactacataactgtagtatatccataaaaattaggaaattgacccagcacggtggctcacacctataatcccagcactttgggaggctgaggtgcacggctcacgaggtcaagagttggagaccagcctggccaacatggtgaaatcccatctgtactaaaaatacaaaaattagtcgggcgtggtggcaggtgcctgtaatcccagctactccggaggctgaggcgggagaactgcttgaacctggaaggtggagattgcagtgagccgagatcatgccactgtactctagcctggatgacagagcaagactccatctcgggaaaaaaaaattaagaaattaacgttgatacaatattactttgtaatccacagatcccatttaaatttccctaattatcccagtaatgtcatatgtaggtccaggatgcagtctagagcatgtgtgctgcatttagctgtcatgcctctttagtctccctcaatggaaaaagttccatagtcttttttatttctgttgaccttgacatttttcaagagtacaggtttgtggaatgtgcagcttgggttggctgatgtttcctcttgataagatttaggttatacattggcaggaatactgtggaagtgattctagattcttctcagtgcatcacaatcagggaggcatgtgatgttgatttataatgttaacatcttttgtgacttgcttgggttgttgtctttcaggttacttaattaataattatgttatacctaataagtatttaataaatatgttatacttattcataagtattctatggggaggcactttgagattgttaataacctattgctcattaagattttagcagatagttttagcatccatttgcgatttttgcctgaagaatgatagccaactggtgattttctgattctgtcttttttttttttttttttttttttatgatggagtttcgctgttgttgcccaggctggagtgcaatggcatgatcttggcttaccgcagtctctgcctccggggttcaagtgattctcctgcctcacccttctgagtagctgggattacaggcatgtgccaccacacccggccaattttgtatgtttagtagagagggggtttctccatgttggtcaggctgatctcgaactttctgacctcaggtgatccgcccgccttggcctcccaaagtgctgggattacaggcgtgaatcaccgcgcctggtttagtcattctttttatatgtattagcattttactgcaaggaaaaatgttcttttctgcctgtttgtttatatgagcacagactcacggattcctgttctattcattgtattatcaactgtttcaggcaatgagagcctcttaaaacttgttgtagcgtctttttgtcctgcctgcagctatacagtactacaggatttattatagttttctcccttttcatatttataactctcttctacagaaagaaacctgtcctctactgtcaacccaacaaatctgtcacggctaactctcatgcatatgccttcctcactccaaattgcccatcccagttcaccctatagccatcctaaagctatgcttactgtggttaggcatgaatatcccattctggatcaatttgtggccactatttccccctccactccctgaaagatttgttttgcttagctaagcaaatccaatcgtgttggacaaaattattcaggaacatgagaagggagaagctagtctgtttatctttaacataattgctgatatgtttgagtttaaatctgccgtctttcgtgtttcatctatttttttttatcctccattcttgccttcttttagatgtattccagttcatcctaggatttgcttattagttacacattctttaaaaaattccgtttagtaggccagtcatggtggctcacgcctgtaatcccagcactttgggagaccgaggcgggcagatcacgaggtctggagattgagaccatcctggctaacacggtgaaaacctgtaactactaaaaatacaaaaagaaattagctgggcgtggtggtgggcgcctgtagtcccagctactcaggaggctgaggcaggagaatggtgtgaacctgggaggtggagcttgcagtgagccaagatcctgccactgcactccaggctgggcgacagagcaagactccgtttccaaaaaaaaaaaaaaaaaaaattccatttagtaaaaaggaaaaaatttagtggttaccctgagaaaatgaaaatttttcagtcttaaggccctttttttttttttttttcttttccactttcaaccctgagaagctaagtatcataatcttaatataaccttttggttttatatatgctgtttttaagatatgaaattactttttataaagttagattgtcaatcttttttcttttctttgtgggaggactttgatatcataccaagctcttccactcaaggttacatagttacctgtattttctcctaacacttttatgttttgattcttttttttttttttggagaaaatacatttgaatgatataacttacgatgatggtataatagttcgttgaatttggccattttgtatatagtataatagctttgttgaatttggtcattttgtatatagtaggccacagtaattggtgagagttttgaagtgtgaagatgtgtgatttctaatatgtaattacaattaaaagtataaaaccaagaagagagtcttttgcaaatttggagaatggggatttatcttttctgtctctacaactatctagctatgcaccctaaacaatgtgcttaaagttttttttgcacctacaatttcctcagccctaaattaatcttgtttttaggtctcaatgcttttgagtttcaatgagtcctgctttgagggtgatgaaaacgtgagaaacatgtaagaacacattgaagattatgtcagatgcggtcatattcctattgataatatcattaagaggagctgtttttataggagttaatatttaatgataaattgtagtatattggggttgcagattgctgactatagtttatcagaaggtgggaggaattctcttagtttccttcttcctcattcataaagaaactgggtagtttttattttaggaagagctctctagtttggtcagctggctgttatgtgaacttatccaacttgcttaacccctcaaggcaccagtttctttattggaaactaaagataaaaacaccaaccatagagttttttgttttttgagacagagtctcgcactgtcacccaggctggaatgcagtggcgcgatctcggctcactgcaagcttagctgcccgggttcacaccattcttctgcctcagcctccgaagtagctgggactacagatgcccgccaccatgcctggctaattttttgtatttttagtagagatggggtttcactgtattagctcaatctcgtgacctcgtgatctgcccgcctcggcctcccaaagtgctgggattacaggcgtgagccactgcgcccgaccccatagagtttttttttttcttaaataaattgttacaaaaaaagcttattgatgacacttgttaaagatggtaaggcagatattttttcgggggtggggggggcatggcagtagatatagggaccactatgatagaatcttgcagtggcagaaagaaattaaactcaacttggggtcccataaagataagtggaatttataactaaggagctgagtgcttgaagggagtgtcagtggatggaaaattattactaagaggaagcatcaacataaggggtttctggctaaactgacttgatagcatggcaggccaggctaaaatatccagagtggtcctatatcaagtgtgtgggggttttcagtaaactgactgagcaggattctcattcagcctggtttctacaaggacagagagggagcctaaagttctcctagtcagaaagaactcaagagtcttgctgaaggtttggtccaagcaaagagtttttgtcaaaataaatgagaattatgtttgttaagcacctattatggtgcctagcacgtaagtcctcagcaaactgtaactttatatgaactcttaacttctgtaatagccacattttaatttcttaaaggtgtggtcaattcagtttaacatgagttaataatttaatattaattttcttctgcatagttagtaactttctaaagtatatattatataggagagataacaaatatgtaatatgatctctagggcctgtagcaaatagttattattaatcaggagacaaaattgttagctaggcagccactacaaatcaatttaagttggtacttaaaatgtaacttcacagtagcttacacctataattcttgggatgccgaggcagaaggattgcttgagactaggagttcaagaccagcctcggcatcatagagctacaaaaaagttttaaagattagctgagcatggtggtgcacacctgtagttccagctacttgaagactgaagcaggaggatcacttgagtccaggagtttggtgttacagtgagctatgatggcaccactgcactccagcctgggccacagagtaagaacatgtctttaagaaaaaaaaaaaagtaactttttatttgtaaagcagtgttcttcaggagcattatgtttcttctggggttttaaatcatgtaatatgacattaaattttgtggtaaatacattctggtgtacttggtaaatctgtgtgtatgcttttaatgatgactggtcaggtgggaaaggaataatattaaaataaacagggaatagtagttcacctgaattgatgaattatatatttaatgattgctttctacatacaggtttactcagtgtttattgaacatgtgtcactgaggatatagcagaaaaagaaatctcatagaatttgtattctagtaaaaacctatttttttttaatagagaaataaaatagagtaagtagagagcaacaaggaatattggttagaaatgtctctgtgaggaaggatgtttgagcagccgtgcttggagagagaatatctgagggaagaacattccaggcaatgacaacagcaaagactaggagggaatgttcttagtgagtgcagctgggttagaataagccagtagaaaactagaggaaaattaagaggtttgtaggaggcatatcatgtgaggactttggactttgacttgtgggaattcattggaagattttgagtacaagagtgatttgttcttttttccaaaggatctctcttagttgctgtatggagaagagattgtataaaagggacaagagaagccaaaataccgattagaaattatgcattaatgcatggtagtggtaaattggactagagtagaggggtgtaaaaatgtctggtgacatttttggtgtcatagctgagggggtgccactggcatctagtgaatggaggccagggatgctgcttaatattccacagcacacaggacagcccccacaacaaaaaaattgtctggtgtaaaatgtcggtgttgttgatgttgagaagccttatactataagacacagatttaaggtagaaaacttacagtcctgctttcatgaagcttgcagtctatgacccaataaacatcgtgtatgtgggagtatatagcattatggtatacagtacatgtcatgcatatgggagtgtattgcagtgtacctactcagacttaggtcagagaaggatttgagaatgtgacatataaaattgaaacctcaaggatgaaaataggcattcatagctgggcgtggtggctcaggcctctaatcccagcattttgagaggctgaggtgggtggatcacgaggtcaggaattcaagaccagcctggccaacatggtgaaaccccatctctactaaaatacaaaaattagctgggtgtggtggcacatgcctgtaatcccagctacttgggaggctgaggcaggagaatcgcttgaaccagggagtcagaggttgcagtgagctgagatagtgccactgcactccagtgtctcaaaaaaaaaaaaagggacattcaccatacagaggggttggattagagtgaaaagtgttcccaaaccaacgaaaagagtatgtgaagatctagaagtagaagtctttgaatggatcctttggagatgagggaggcgggcagagttgaaagagtagtggaagtcaacgtaagggtcttgtgaggcatggtaaacagttgttttgaaagtaaggcctgggctgggtgtggtggctcatgcctgtaatcccagcactttgggaggccgaggtgggtggatcacctgaggttgggagtttgagatcagcctgaccaacatggagaaaccccatctctactaaaaatacaaaattagccaggcatggtagcacatgcctgtaatcccagctactcgggaggctgaggcaggagaattgcttgaacccaggaggcagaggttgcagtgagccaagatcacgccattgcactccagcctgggcaacaagagtgaaactccgtctcaaaaaaaaaaaaaaagctgtagaatgtaactatttcaggtaagtatcaacttgtaaaaatgatttttaatttctcccctttttcttataattcttatctagctaaacttttattatcctttagtaatggcattcataacttttatattgtttttacttaatattagatcagaagtatttttccatatagctgttactgtattcatcaagacacctatttcgtaatttttagtgattataaaccatttcactcaatggctacaccaaagtttttaactgtcctcttgttggtgaacatttagtttgttccagtttttgctttttatgaataatgctggaatgaacatacatatgcaaataactgttttttcttttttccccctgcatagcaatgtttcagtcaataagtagctttttgtattacttcttaaaaattttttgtgtgttgatggtaattttttttaatatattttaaaataggtactaccaaatagtatctcttgtttcacttcttggtgagtactggcttatcacattaatttaggaactttttttaaaaaacctacagagattatggagaagtctggcgaggaaggaatgcctgatcttgcccatgtcatgcgcatcttgtctgcagaaaatatcccaaatttgcctcctgggggaggtcttgctggcaagtaagtagaacaaaaagctaattttgagttcgttcataattagtaattaaataatttggggtaaaaaaacttaaatcagaagtacatcaattatctagaggtgaaatgggttagtgtttcttatactagagaagaactcttaaaacttcaaccaaaaacgattttttaaaaggaattatctatcatactctttgagtatgaaggtccttctttccttgctaaggagtacaaatggattgtgcaaaatcagattctgagagtaaagtgtagaaggtatgttcttgacaagtatagagtgtaccagttacttttttagtgtggtcaggatgaaatattgagatattcacaagcttaaaattctgtgtaatttaataaaactaaagcatgttttttttttttaggcgtaatgttattgaagctgtttatagtagactgaatccacatagagaaagtgatggggtaagttttattttatttcataagcatttgaagtaatttcacaatataaatactaaatatgaatacattcacattaacgaagtctataataaattatagtctgtagtaaattactactgcttttcattttaaagtgtcagttaaagtttaagaaaatgtattgaaatgaaggtagagataaaattttgttttgtagatagttttgttgtcactttctgggcatcaaatgaccttttttgtttgggctgtctttatttcttctctatatgtctgcttttccttcttctcctttaaaccttaattttgaggcaagaatgctcttttaaatatctcaatttctcctccagcaggctgctgccatcaccagaagttagtgatagtgagtgagttgttattttaataactagacctttcagtacccctgtatgcccacttggaatacccgaggatagtttttttctaatattattgttgtattatgggtacatgagtgttgagctgagataaccatttctgttgtaccttgctgtacttcatcagagcaagactctatgcccttaccttttattttgcttttcttcgaaatgtcagtgagctgccagctgcccctctatattgttttgttttgttttagtactattaccaggagacagaagtgtcctttttttttttttaaatccaagttagttcaaataagtatttttctcttgggttttcaagtttttatgtctaaaaataaattatttaatttttaatatatatgcttcaaagctttaagggaaccaaacagaaatgaaactgattgggaggaagagtccacctccagtctccagctcctcttggcagattgagagagagagtatccattggctagaaatcatatgtcatctcaattgcattatttgctaggattcattgttgcacagcaatataatatgatttcttttccttaacagtaaaagttatcctggcaaaaaggaaaatttaataattaatataattttagtgagtcatataaaagtgatgctatatattgctaattataatttatatcttggtctagagcagtgattctgagtctttttttgtggcaggttcctcagagtattaagaattgtacccaaggccgggcacggtggctcatgcctgtaatcccagcagtttgggaggccgaggcgggcggatcacctgaggttgggagttcgagaccagcctgaccaacatggagaaaccccgtctctactaaacatacgatattaactgggcatggtggcgcatgtctgtaatcccagctactcgggaggctgaggcaggagaatcgcttgaacccgggaggcggaggttgtggtgagccgagatcatgccattgcactccaccctgggcaacaagagcgaaactccgtctcaaaaaaaaaaaaaaattgacccaaagctgagaaaattaatttaaaaatccaaatattttatgtgatccatcagagaaccctcaaagaaatgagtataggatgttgacatatgactaaaaggatggtggtaatttggaaggttgagagaagagaatcttaactcttcagctagattatagattcttcagggcatccactaccttgattagaggaaataagccctcagaagacagttattgattcattattagccatagaagtactcccatttcctcaggtgtttcaaagtgtcaaccctcatgtgtaatctttaaaaatacatatatatatatatatataccttgctggattttggggtccttcatagtctatttttactccaaacaaggttttctgtttaacatataccaaggataacttttaaattttttaaaaagaaaaaatgattacacatagtagctacataaacagggaataaataggcaacggaactatgaaactggggggaaatgctcaatatataaaccttaccttaaatagattattatttggctatagaaatgggatatatgtacttaattacctttatacataaatgttctatcaacatcagcagatcaaacactgacagtgtgttgtatagtggattcacagagggagaagactagaaaacgtaagacgtgaccccacctgtgtgtctagtgcagcttacactgtagttataaacacaccttaaatgatcaaaatatttcgtatagcttggtaacaaataaatgacaaaatccagaatgtgaccattgccatgtgacttggacagtgattgctgtaaaagttcagctgcttaagcagggggaaagtcagcttcttagagaaaagatagtatttgaagaatgatttgaatggtagaaatgacatgaggatgatgacctttcaagtggactagagaggcaaggacaaagtataagatatcttcaaaagaaaggacatcttttttggctaaagcagagaactgttgtggtgaaaaataagaatttaggttgcagaggtacttgctaagagaccagccttttgaacatcattttagggtaatggaccaccttatgtttagagcataagaatgatagattcaaaaaaatatctgtggtattttaatctgttagaaacatttaccatattagattaaagagatgcaggcagtcaggtagttgtgaaataattacagagaccaaatggtaactgtagacttattatcattacatagatatgtggattaaaggaactttccttgtttactgtgaaaactgactttacagcctagaattttaaatggggaaatattatatgcctttcacaataatcactaacttagaaaaatgttgaactataattgcaagtagcagaaatgtgctgaaaaataccgcagaaggagagagaatgaagaaaatacagacgtgattaaattctgagctcttaacttgacccactgtagcaaaaagctagccgcaaaggtgctccataaatgcttcttaacagtgtggatgatgtcgccgggagctggatgttaacttgcggggtgggaaagatgaaagtatgctagaattacagaagaggagaaagttggaaggtattataaaaattaagtttttttaaataacaaaaattatttttgtttagatatttaaacaaagaattctagccagagttaaatcagagggtttctttagactcctgaatgtctgctttatgtcggagagaattgttctgttgtaaatgattataagtagtaccactagaaatagggattcattcatttttcttataattaagacatcttttaaataaatatttttcagaaagtagagttgagtataagtcataaattaagtaattttaatatatattcagaaaggttactatttaggggaaacttcttaagttctttactaaatttgttttttagtatgtgttccatactaaactaactttttagaatgtgttccatcttcttaccacaaacaatattgatattttcccaacttttaaaatacaaatttgtaacaaagggtttagccagggattcttagtctagggattcacgaatccccagaaatcttttggaaaatttccagaaaaagcaaaactacattttgctgtaagttgtctttatattagacagggctctgggatcatactccttccctttttctaaaatgctagtttgtgttttataattagaatataaattctgtgagatctgggacttgatctgattcatttgtgtctatagtccaagcacaatcctggcatacggtgaaagctcagtaaatattttttgaataggaaatatttgtatttattcatttctagtaattttcttaaggctgtccttaagtcatatatttaaaaattaatttgaggttactaattggtatgaaagtctgtatttatagagttttatactttcatgcaaaaagttcttcccttgaaaaagactcataatgcttttgaattagtatgccactgatcaagtagttgcacaagttggtaattttccaagggtaaagttgagcaggggggtgacctgtatttacccagctcctacttgtgccaggccccttatttatacacacacagagtcataggtaatcttctcagcacccttcttttacacatgagacttacagagatgaggtagtttgcacaggtcacaaagctaaataaatcatgcagccagaatttgaattagtctgactcctattctctttacattattccatgtggcctctttaaggtagagattatgtatgtctgtaccccacctgtgtctaccatgcaggaaaaatcatttcccattcttttgtaaatatcatgtttatcagtcttaagatactctattttattgattgagacagggtctcattctttgtcccaggctggagtgctatggcaccatcatggctctctgtagcctcaacctcccaggctcaagcgatcctcccagctcagcctcctgagtagctgggattacaggcacacagcaccacactcggctaattttttgtattttttgtagggatagggtctcgcttcattgccagggctagtcttgaactcctgggctcaagttatcttcctacctcagcctcccaaagttctgggattacagacgtgagccactgcatccaaccacaagataatctgtttttaatggtaaatattttataaagttgttgaaaggaatgagttaagcccaattccttgtcagttatttttcacttaaatacacatatttatcttaatccaaaaacggtttaaggcattttgatcttagagaagggaaggaaaaacaggatagattagtctctttttgagcccaaaagaatctctgtattgttttcagattattaaattttgcatgcatttttctgttttactttaaacggataaatgcaatacccatagctgcttttacatttttatatcacagtttttagaactatgtgaatattagttttttcatatttactttttattcacttgtcaaagcattgctatggagaagacctatactgtttgaaaatgcaggccgggcgcggtggctcatgcctgtaatgccagcactttgggagggcgaggcaggaggatcacgaggtcaggagatcaagaccatcctggctaacatggtgaaaccccgtctctactaaaaatacaaaaaaaacaaaattagccaggcgtggtggtgggcgcctgtagtctcagctactcgggaggttggggcaggagaatggtgtgaacctgggaggtggagcttgcggtgagccaagattgcaccactgcactccagcctgggcaacagagtgggactctgtctaaaaaaaaaaaaaaaaaaaaaaaaaaaaaagagagagagagagaaaatgcactaacattagtcactatgtttttaaggtatgattgacataacacttacctttgctatgtggtcttgaccattcaaatgacactgtctaaaattattcattaaatttgacatgattcttcaagtaacatgtaatttattagagtcttcattagtcatcaattgtatcacattttgtcatactggagaatttttagtttaaaaatttttttgtctgacaagcagcacgtaggacttcataagaaacatttttactagtgtttactttttctctactgttataagtagtcattttaagaattttggttatgggccgggcacagtggctcacgcctgtaatcccaacactttgggaggccgaggtgggcggatcacaaggtcaggagattgagaccatcctggctaacatggtgataccctgcctctactaaaaatacaaaaaattagccgggcgtggtggcgggcgcctgtagtcccagctactcgggaggctgaggcaggagaatggcgtgaacccgggaggcagagctttcagtgagctgaaatcgtgccactgcactccagcctgggtgacagagcaagactccgtctccaaaaaaaaaaaaaaaaaaaagaattttggttatgagagctgtgtttcaaaagataaatattgctgcaaataaatattagctggttaaattttattttttaaaatgtgcttagttcccttccccctcctattactactctctgcttgatttatctaatttctatgtcttatttggtgtaagttagtattttcatcatgagagattcgacttttaagctatgttagtctagctgatagtaaaagcttaaaaactagggtggatgggagatgtcctgaattctcatctcagtaattgccttcaatttactttacagaataattgtaaacatcccagctgatatgatagtttaatcaacataactagtgttctatagttttattaattttactatattaaggaaatataaacttcaatatgaaataacctgtggtgttctataataatttcaccaatatttctttagtaagagtcttacctgtatgaggtacttcctatgcaaaaaaggtcactcgccataatgtattcaacagagcgcaaagatagacattgatgttaattatacctgtgcacaaatcagagccctgccatttactaagattgtcaccgtgacaaataacttaaatctctctgagctttagtttcatcacttataaaaatgataactggaatccttactttgtagggtacctgtgaggattcagtaagattatgtatataaagttcttagcacaaatattatttttccttccttagatggtaggaggacatagaatggaatatgaaattgtctttactctaaaagagtttgcagtctaagtggagagtcttgtgaaccgttgcaaggtagagttaattgctataatagatgtgtaaaaataggtgtgctatatcaactgtacgagttcagataaagaaagtgcaggaacctagataataggtttctcttctaatattaatgaaagcccatgagagagttacataacagtgtttggaaaaatcaaatataatggctgcggaagaggtttcagtcctctattgtctatccagagtgatgagaaaatgtaatttgccataagataaaatgacttttaagtgtggtcattagctaaagttcttctcaatttagtgattctgtaatgtcagccattgcaaatccgtgtctacttgatttattggtttggttttcttttgctttttatttttttatttttcattttttgagacggagtctcaccctgtcaccgaggctgtaatgcagtggtgcaatctcggctcactgtaacctctgccttccaggttcaagcgattctcctgcctcaccctcccaagtagctgggactacaggcatgcaccaccacgcctggctaatttttctatttttagttgagatgggtttcaccatgttgatcaggctagtctcaaactcctgaactaaagtgatccacctacctcggcctccaaaagtactgggattacaggcatgagccaccgtgcctggctatggtttggttttagtatgtctttttttttttttttttgagagagagtcttgctctgtcgcccaggctggagtgcagtggtgccatctcagctcactgcaagctccgtctcccaggttcacgccattctcctgcctcagcctcctaagtagctgggacgacaggtgcccgccaccacgcccagctaactttttgtatttttagtagagacagggtttcactgtgttagccaggatggtgtccatctcttgacctcatgatctgcctgcctcagcctcccaaagtgctgggattacagacctgagccactgcgcccgacctagtatatcttttaaaaagcaacttctcttccccaactgtcactactatagcaattcacagaaatacaggtgattaataatgtaagtgtcagttggaaagcgagaggtactttatctgttgaacttgccaaaattgacccaaatacgacaaatggaacaacctttcatccaaccttattaataagtccacctccaaattgagtcatgccatttagtctatatcagtgattctcaaccctggctgtatatcagaattacctgtcaggctttaaaagaacaacccaaatccactgaatctgtgtattttgaaatggaactttggcatgtgtgcaattttaaaagctccacaggtaattccaatgtggagcaagggttgataatcactttatgtgtaaatctttgaagcagattttgttttaatgtcctgtaatttttttttaataaaatggtaggtttttatcttttttttttttttttttttttttggtttgggggttttcgggggaagagggttgtaggccctgcattaaaaggtctttgtgatataccgtaaagtagaaaatttcctcttaaagactgacaaggtttatcattagagtatacttatcacatgttgttccatctcaacccttcctgaatagattaaaatgggaaactttttatttatttatttatttatttatttatttatttatttatgaatgaatgaatgaatgaatgacagggtcttcctccattgcccaggctggagtgtagaggcatgaacatggcttactgtaatctcaacctcctgggctcaagtgatcctcccaccttagcttcccaagtagctgggaccagaggtgtgtgctgccacacctaattttttaaatttttgttttgtagagacggggtctccccgtgttgctcaggctggtctcaaactcctgggctcaagtgatcctttgaccttggcctcccaaagtgctgggattacaggcatgagccaccagccctggatgagaaactttatttagggaaacatgttttaagtccacataataaattttgcaattaaatgacagctaatatgcttgttgtggaaaattggaaaattcaaagaaaataaagtatctagaactccctacccattatcattatattgctgtatttcctttctttccaggtatttttacatatgctaacatgaacagatacacagacgtatatgtatccaaaaagcatgggccatacacagtatcatcttttttttttttttttggagatggagtcttgctctgtcgcctaggctggagtgcagtgggtgtgatcttggctcactgcaacctccacctcctgagttcaagcaattctcctgcctcagcctcccgagtagctgagattactgatgcacacacaccatacctggctaatttttgtatttttagtagagatggggtttcaccatgttggtcaggctgatctcgaactgctgacctcaggtgatccacccatctcagcctcccaaagtgctgcgattacaggcatgagctactgtgcccggcccagtatcatccattttttgccatgaggatacttccccgccccatccccaccaccaccccgtctgaggcaggaaaacaagcactttttttttctttttcttttctttttttttttttttttgagatagagtctcactttgtcacccaggctggagtgcagtggtgcgatctcgggtcactgcaacctccgccctccgagttcaagcgattctcctgcctcagcctcccggagtagctgggattgcaggcacttgccactgcgtgctgctaattttttgtatttttagtagagatagggtttcaccatcttggccaggctggtcttgaattcctgacctcgtgatccacccgcctcagcctaacaagcccttttttttttttttttttttaagagggtctcactctgtcgttcagactggtgttcattggtatggtcatgggtcactgaagcctcaacctcctcgacttagctcaacctctcgcctcagttccccaagtagttgggactatgggcgtgttccttttaaacattttttgtagagatagggtctcattgtgtttcccaggctggcctagaactcctgacctcaaggaatcctcctacccgtctcccaaagtggtgaaattgcatacacgagtcactgctcctggccaatgagggcaactttttaaaaaataacattcatctgctctcatttttctaataaaacattgccatttattatatggctttattagtgttatctttgttgcaaaagtatatgtaatagtctctaaagatggttaagagtttgtgtcacatcaactgtatcaataacctattttgtattttattttcccaatattttaagatgaaaacttccaaatgtatttaaaaaggggatatgatatgttggaacagctgtatattgtctctctagattcaacaactgttaacattttgccatagttgctttatttttctttttatatctactgttttttttctttctttgactgaaccctttgagagaaaattgcagacatcatattttacctgtaaacatttaagcatgcagctcttaagaatgaagatatttttcagccaggcacggtagctcacacctgtaatcccagcactttgggaggccgatgcaggcagatcacctgaggttgggagttcgagaccagcctgaccaacatggagaaaccctgtctctactaaaaatacaaaattagccgggcatggtgtcacatgcctgtaatcccagctactcgggaggctgaggcaggagaatcgcttaaatcctcgaggtggaggttgtggtgagccgagaacatgccattgccctccagcctgggcaacaagagtgaaactccatcccaaaaaaaaaaaaagaacgaagacatttttctgtataaccataataccattattatacctaagaaaattcatttttttaaatttatttttaatttttgtgggtacactgtaggtgtataaaaaaataaattgtataatattgaatatcaagtttaaatttccctagttgtcactagagtgactattgtaattgttattttgaatcccagtctaatcaagtttatcaatcaagcacattaaacaagtctttaatcagtcaagcccctcacctgtttttttccccttgaaactgactttgaagaatctgagccagttttttacaatacgtcctgcattctgaattcatatgattgttttctcatgtgtgctctaacttgatcctctattcccttttttcctgtaaactgggaattagcattattagattcattctaaacattttttggcacgaatacaggacatgactgtactttataatgcatcatatcaagaggcacatactgtaaagatatctttattttagtctgtcggcttaactgtgatcagcttggatgattagagcttgttctgtacagtattaagtagttactattgtagaaacctgtagattttccaaaattcactaaaatatgaaaggattgagtagtttattattcatactgagaatacttaatttatttttatctagagatgtttttatcaaaataagagcaaaaagtaaatacaatttttatccgtaaaaactctaaaatctttcaaaaatctgtttaaatctatatagttttatgttttgtatttcctacttatttagcagaaatgatgaagaaactgttctgatggcctgcttttctgtccttttcctactgctttaaacattgattttcttttgtactaaatcatatagccaaatattgtttaagtaagtcagttttaggaaatgcttgtgttgctgttgaattataaaagctgagtaaatttcagattaaactttaaatgactgtgaaataagacataaactagttaatggtaatttgcttaaaatgacttgagattattattggaagtttttattaattgatacaggtaagaattgatatttaataaaatgttctcatgcttagactatattacttttcggtagagaaattagtattttgctgtaatgtgttatgaaatacatgtgatatcctagtttgtctactgacactggggtcttgaatcttaaaaaaaggcctccgatgaagcagaggaaagtggatcacagggaaaattggtggaagctctcaggcaaatgagaattaatcataggggaaactaccgacaacttctggaggagatgctgactagttacaggctagctaaagtagagggagaagaaagccctgctgaaccagctgccacagctacttcttcgaacagtgatgctggaaacccagtgacaatgcaggaaagccatactgaatcagaaagtggtcttgctgaattagacagctctaatgaagatgcagggacaaagatgagtggtgaaaaaatatgactttcctttttggtaatatttttgtgatctttgatggtttttaacctaggaagtgtaatgtatgcatttatataactgttttgttatttgaatcttggaaaactagttttattatattcagatagccttgttttttaaaaaggcctttgcatacacctttatgagatagtgtaaaattgactatttatagtactatggatttaatgaaattatatgtcatttcacattgtatgccagaaattaggctaccaattatgaattaaagtcagtagttaaattaatactagatagaattagaaattttgattagagagattatgctatattatggaaaaacttgttaatgtagaattatactgcttcatattattttacctattagtacactcatagttagctttgtaataaatttatgttttctttaataattttagttcttcaaagaatggctgatgctggcctgtaatttttctttcaaggatgataatttgtgtgttgtttgatttgtttatattttacatctctgtagttttatttttagaagttgtgagatattggatgtgtggctatttttcctttctctgtattctttatgaaacataacttttgaaaaacctatgtattattcatacagctttggtttgtatattctgtatagcctaactacacacatcaaaatgtatgtcaaccaagtgtttagaatgaaattataagtgtttaagtccaaataaagcatgtgatgtggaataatctatgcatgttgtacttatttttgaattaattttttaaaaacaaccaagtttggtatattggaagaatacccattagaaattcatttgtatttatataacatttagaacacttttggcttaccttttttcattaacaaaaaggaaaagtttaatattaaaatatatgtgttgcatacttaaatctattctttttcttatccatcttttgtggtacaaaatattaatctttggacattatgggcacacattagacatgtgagaaaattgccacagtgagcattttaaagattgcagaattgtccattttgttacaaatttttgttagttattaagaaattgaacaattatgggctatttttaaaatagtggcagatgagagtttttgtttaaagggatttttaaattatagatttgtcacatagggaaaaatattttttaaaaattattttataactgtagaacattaacttttcgtctttacgtttatatttatatcatgtgtctaaagttgctttaagttaccataaattgaaacttcggaatctttggatgttatagctgatgttttgatgtatttttccaatgccagaatatttttaagtgctttgagaaaggaaggcatttgatggagaggggaggaaaataacccaacccagttatctatccatattagatacacgtgtacacacacaatatgcaatacacaacatctctctgtaaaagtacccttttcagacaaagaaaggaaggtaatttgttcatcaattttgttttcttttgaaattcaatccaatctggaagtggcataggtaaataataatattcttccttttctcttcctgtagggtgctggagatctagaagacccatggtagccttaaaaaccttctaaaatgcttttgattctgaaaattgggggaaaaaacttttaatcacaattttcttcaatacaaggggaaaatattcttgcggattcccaacgttttgtgatatgagcagaaaatcattagcatttcccatcatttgttcatatttgtgttttctgacagttgccacttgtagcattgcctgtactacagtattttttgccaacctcaggcatactcgttacatctgtattgaactttcggccctagaaaccagtggagttatttcaccacaaatcaacaatgtgcctgaggtgcatgggaaatatagttagctatactctgaaaatacattatgttttttttctttaaacaaaacacacaacatgtaagcatgtaagagtaaagaattgtatgatatgttccttttttcagttcaccaagttggaagccttttgcagctctgtggcttggaatttcatttgagcaatttctataggatatgtatttattattgattgttatttaatttttttccaattttacctgtattaccaaactgggttctccaataatgtccaaattgtaatgttgccttgcttcaagataaagtgtatttgggaataatattataaacccttacaaattttatgcatgtatctactgcatccttcaactctcactagaaaatcttttgaaaccaaatggattaatttatggctatttataatttgctttgacatctcactgttggaaattttttaaagatgagatttgcctttataatgtaaattgtgatttttgttttacatgtgggtttctatagttttaattttttcagcttttaagatacgagttttgtgtaatttggtatttttaatcatttatgttattttaaaagctcagaatatcacattgaaattactataaatacatttaaaattatctattttagatctaaggaaatactacagagatattttcatgggttcagtaacttttcattttataacattgggcacggtacagagtgattgtcacataaggtacttgaagatttattagtttaattctatttttacagtaaccttgaattcttctgagttttgcatgtattaaattcaattaatgctgaacatgaagagtaaagtatttatctgaaagaagtttctgggttaggagaagtaatgaatgtatccatttgtacatggtttacatgttgtggatgctttgtaaacattttcctgtatgtttaaattgtgtttcagcaggatgtaattgcccttgtgtgtagttaaaatgagtcatcatctggtcctttgtgaaatggaattcatggtattttctgtaacgttttcctgaagctgtttctggagagccacacatttaaatacagacagctttcctgatcatttgatttattgtgcacctgatttttggtctaaaaggaattattgccacaatatattttatttattctttagattttagccttgtaagttaaagtgctttacatgatgatgtgaaaagctgtttgtccctttactgggtttggggggttgttaaaagatagggaatgaagaatgcaaaatggtttatcgttcaaactgtccactctgatccaaccctgtactgatagtacttcccagtatgatattgtgatgtttcatacaatgcagtgaacataaccaacttgttacctaaataaagaattgataaaaacagtgtgacatattactatttggtatgattcagtttttaatgttattttaaacttcttatatggttggcatatttctgaaaatttaattccaaagaggaattaaccaaactgtacaggacaatattaaccccttctgtactctagaaatatttatactccttttaaaaaaacctgcctttggccgggtgcattggctcacacctgtaatcccagcactttgggaggccaaggcgggtggatcacgaggtcaagagatcgtgaccatcctggccaacacggtgaaaccctgcctctactaaaaatacaaagattagctgggcatggtggtgcttgcctgtaatcccagctgcttgggaggctgaggcagaagaattgcttgaacccaggaggcggaggttgcagtgagctaagatcgcgccactgcactccagcctggcgacagagcgagactccgtctcaaaaaaaaaaaaaaagaaaaaaaaaaacttttccggcagggggcagggtgggggttactggtgcttgaaacagaaataatgtatga

SEQ ID NO: 11 - DNA, 43423 bp, Homo sapiens
ggtcgcaggcagcgcggtcggcggcggctatttcccgccattgtgcgaagtgaaggctaggggcccgtacgcgcccgcctgactgtcgccagcagctcctcggcggccccaccgcagccgccgctccctgaggcgcgggaggcccgcgccccgcggctcgctgtgcgtgggagggcgcgagcgaacgcgggcgaggagcggccgagccgctgaagaggagctgggcgccggccgcccggccgcgctcggcccgcggatcgcctccgcccggtcttcgccggccccggcccctggcgagatgccgtgtggggaggattggctcagccacccgctgggaatcgtgcagggattcttcggtgagtggcggcgccggggggcgggccgggcgggcagccgagtttgccgggccccggggcagggccccgccgcgcggcccccacgcggtaccatctcgagggctcgcgtggcccgagacggggccccggggcctgcaccggccccagctgggacagcctctcccccggtcgcagcaggcaggggcaggagccgggccgcaggtacctcccacctgcccgagtcgcagcttgggagccgccaaggtgaagtcgtggggcgcgggctgtgattcgcgggctgtgattgacggcctcgctcccagcctgtggcagggccagggccccggccccgggcgcagcaaactcggaggtcctcgaaccctggggagggcccgcagagccgcggggagggaaaaccactttgcctgtgggaagcccacaggatatttcaaaacttccggtgcgtcggggagtgctcgcttgcacagaagttggttctaactcctgtgctaccctcattctctctttcagagataagatttaatgttcatagcttagttttcctgttgggatgactttagaacccatctagtctggatctgctcctgtgccagagccagcaagaaatattgagctacttgagtttgtacacagggctgagaatcctgcaggcgagcttagtaaattttggttgcgattgctgttgctactttactgcgaagggtatacgaagaaaagtttatatttgttgtcgttaactgggcattttgacaaccgttccattccccagtgtctttttacacgtaatgagtggcggagtcagatccagctagaaatcactgtagatggcaacacctgacttgtctggagttaacttagagttgtagagcggccttagctcattgaaaaaaacatcttggggtactagagagaaaaggcagtgggaagctaaatcatcctcagcagccaaaatcgacggcaaacaatgtatggtatttcttataggagggcctctagtgcttactcaggaagtccttattaatttacctgtaattctaattagtttagttacctggcttcccaggctgtaactaatggcattatattagaaaaaagcctggatagacgtccgaacttagccagtgaacactgacagcctgatgaagaaatttaaaactaccttcatacttgaaaaaaaaaaaaattcactatatagcagtcaagggtgctttgaggaaggggcatatatttctccactaaatcctagtaatttatgttcataagaattctagaaatgataatcgatggtcaacacaatggccccaaaatgtcaagtgaagattcaattgtagcattggtttaagagggtgcagatgcatagatactttttaggaaaaatccctccaaagtaaaaaggtttggtgcttaaagggttaaatttcagttactaatattagaaagtttatttattagaaataccccatactctgattttgctggataaatgagatgatttcatatttgatagagatttgaatgtatttgtgtcaaattttgtcttctaaatgtatgatcctaagggacacatctcatcatagtacaggaaggatgtaacttagatataaaataatagcttcagagtattttataaattatgtggattgttgtgggaacctgagaagtttcttgatgtgtttctccccagaatgtcttgttcccgtgtacgttgtgtcttatagaaaagtcataatgtgttcgtagaagctgttgctatattttcgtatcactgtgattgtattgcatatctttattataacagcattacaagtatgtttgtgtgataacttataggcactttttggtttagtaggaaattgttttccccccagataggtaatgcatatgcattgtacagaaagaaaaaagcagttcagcaacatatagcagaaaaggaaagatctttgaagatccttcaccttcaagataaccactggttcgtggttgtgtagtttattttctctgcatatatttagacagtttttttaaactgaaaagttaagttttgttgtgtattttattttgaaatatgcattttttttttttgagacagtctcgcactgtcacccaggctggagtgcagtagcgcaatctcggctcactgcaacctccgcctcctgggttgaagcgattctcctgccccagcctccggagtagctgagactataggcccgcgccaccacgcccggctaatttttgtatttttagtagagacggggtttcacagtgttggccaggatggtctagatctcttgacctcgtgatccgcccgcctcggcctctcaaagtgctgggattacaggcgtgagccactgcatccagcagcctgaatttttccctttcttactgtccttgtcatatagtattgtataaacttattaaccctgtcatatattttaagttaggtgtcacaataatctagagtgtgctgtccagggcagtagccatgtgtggctatttaaatgtaaattaattaaaattacacaaaattaaaaattcacctcctcggtgttagcacatttcaagtgctcagtagctacatgtggataggggctattatattagcacagatctagcatattcctaacatcaggaagttctctgtacagcactgatctagaggacaccgctttttagtatgtgatgctagtttttttggataaccagctactcactgactctctttcaggatctgaatttggtcactgtatcttatccgttctaggggttttgtttttgtttttgctttttttgtttttgagatggagtttcgttcttgtcacccaggctggagtgcaacagtgtgatctcggctcactgcaacctcctcctcccaggttcaagcaattctgcctcagcctctggagtagctgggattacaagtgcctgccaccatgcccagctaatttttttttttttgagactgagtcttgctctgtcactcaggctagggcgcagtgttacaatcttggctcactgcagcctctgcctcttgggttcaagtgattctcctgcctcagccccctgagtagctgggattacaggtgcatgccaccatgcccagctaatttttgtatttttagtaaagacagggtttcaccatgttggccaggctggtcttgaactcctgacctagtgatccgcccaccttggcctcccaaagtgctgggattgtaggcgtgagccaccacaccgagccgctaatttttgtatttttagtagagacaggatttcaccatgttagcaaggctggtctcgaacaggtgatctgcctgcctcggcctctcaaagtgctgggattataggcgtgagccaccgcgcccgacccagaccctcatctccaatgctactgtcaaaattaaagccatcgtagtctctttcctggacgctggaacagccctctaactggtttcttgcctccagtcttgcttctcttccacctgccatactggaaccaagtccttcagtgacttcttgttacccttactatctgatccaggacttttaaagtggtttatgaggcccttgttggctccacccttgccttgctctgagactttatcactgcgtaccccctcctcatactccatcccagccgcactgaaccttttttcagttctttaattttgaacctgtgtctaggcctttttgcatctgctgatttcttgtgcctgattccccctcccatcccatgtccacttttctggctaagtcttacttttcctttgggaacttaagttaggtaccaaagtagggtacccctgctccatgttactgcaggatcctattatatatgtctttgaaaaatagtgtgtaaagtgcattgttgaaattccttgtttcggaagttcctttgctggattttgaccccgcgaattcagggcccctgtatctgcattattcaccactgtatcctaatttcttagaatttgccttgtacattgaaagtgctcagtggacacttgttgaacaaaagcagtgaaaagactgattaatcagaaatgttgttaattgaaatggctagtgagatcacaaatctcaaaatttttcttttctttttttctggagtcagtgtcttgctctgttgcccagggtggagtgcagtggcgtgatctcggctcactgcaacctccgccttctgggttcaagccattctcatgcctcagcctctcgagtagctgggattaaaagtgtgcaccaccatgcctggctaatttttctatttttaatagagacagggttttgccatgttggccaggctggtcttgaactcctggcctcaagtgatctgcccccacttggcctcccagagtgctgagatctcaggtgtgagctgctgcgcccagcctctttagctgttttcccttcaactattggttagaccaagatcattattctcgttatatttaagcttctttggttgtatctaacagaactagactagctcatgcaaaaaagagcagggttgggtgaagaggggcagagcagactattttatcactagcattttagagaatttaaagcaataataaaatgaactaaaagttagttggtctgctttttattatcaccatgaatctaaacagacaatctgtgcccttattgtctgtacccagcttggacctcttctaccactctgtccttggtaggccactgaaaaaagttaatttatattaaggctataaaacccaagaacaggggaagtggttgggtattcgaagagactgagtggaatcaggaactggaaagctagcaggaatccaagcaactcagtatttcttctcttgggatacattaatctctgcacactttctctttctctactccatgtctcccaaatttacttgttctcggttccaacccacgctagctagcatctttattttcaggcatagaaaatctgattggcacaacatggagtcaggaatccattcactcagggatcagtcatctgtggccatggcacagagttaggtaggacaatcgtgactgttatccacacctcaacattgggggcgttctcaaagaagaagaatagctccggcagccatggcagatggcatacgtaggagtttttaagttataataacttacacatggttttaaaaaaaatcaacatgatggtatgaactgagtgaaagtacgtgctccctccattgaagtaaccactttttttttttttttttttttttttttttgagatggagtctcgctctgtcgcccaggctggagggcagtggtgcgatttcggctcactgcaacctctccctcccaggttcaagcgattctcatgcctcagcctcttgagtagctgggactacaggcgaccaccaccacacctggctaatttttgcatttttagtagagtcggggcttcaccgtgttggccaggatggtctcgacctcctctgccctcgtgatccaccaccctcggcctcccaaagtgctgggattagaggcatgagccaccgtgccctgcctgaagtaaccgcttttaactgtttttgcttttagaggtttttttctttgagacagagtctcgctctgtcacccaggctagagtgcagtggcacgatctctgctcactgcaacctctacctcccaggttcaagcagttctactgcctcagcctcccgagtagttgggactacaggcgcctgccaccacacccagctaactttttgtattttcgtagagatggtgtttcactatgttgctcaggctggtccaaaaaaattttttttctttgaaataaaattcacataacaaaatttaacattttaaaatgtacaattgaattttttttactgtattcataatgatgttgtgcaaccatcaccaccactatctttttctcttttttttgagacggagtctcactctgttgcccaggctggagtgcagtggtgcaaacttggctcactgcaacctctgcttaccgggttcaagcgattctcttgcctcagcctcccaagtagctgggatcacaagcatgcaccaccattcctggctaatttttgtatttttagtagagacggagttttaccatgttggtcaggctgctcttgaactcctgatctcaggtgatccacacgcctcggcctcccaaagtgttgggattacaggcatgagccaccacgcccggccacccctatcattttcatcactccaaaaagaaaccccatacctttagtagtctctcccatttcttctgtcttccatctctggcaacaactatacttctgcccatggatttacctattctggacgtttcgtgtaggtggaattatacaacatgtggcctttgaggtctggcttcttttcatttaccatgatattttcatggttcatccatgtcatagtatgcatcagtactgcattccttttttttttttttttaagagatagagcctggctctgtcgtccaggctggaatgctgtgtggcaagatcatggttcaccgcagccttgaacttccagtctcaagtgatcctgcagcctcagcttcctgagtagctgggactacaggcatgtattacctgtattaccacacccagctaatttttaaatcattttttgtagatttggggtctcactatgttgcccaggctacactcaaactcctggcctcaagtgaccctcccgcctcggcctcccaaagtgctgggattacagatgtgagccactgtacccagtctgcattcctttttatggctgaaaataacattccattgtatgtctatactgcattttgtttatccatatatttgctgatggacacttaggttatttcctggctgttataaatactgctactataaacattcatgtacaagtttttgtgtgaatgtaagctttttggttctttcccagatatacctagggatggaattgcaaggtcatatgataattttatatttaactttttgaggaattgccaaacttttccacagtggctgcaccattttacttcccaggttcaagcaattctcctgcctcagcctcccaagtagctgggattacaggtaccaccagcaagcccagctaacttttgtatttttagtagagatgaggtttcaccatgttggccaggctggtctcaaactactgatctcaggtaatctgcctgccttggcctccctaagtgctgggattacgggcataagccactacgcctggcctaaaatgtttttaagaaaggttgtgtgagaagagaacaagaggcacattatataatgttaaaacagtcagttcaccaagaagacctaactatatatgcaccaagcaacagagcttcaaaatgtatgatgcaaaaaccagcagaaataaaagaagaaataggcaaatctgcaattgtagttagatattttactactcctctctcagtacttgacagaatagtgggtagaaaatcaaaaagaatactgaacaacacaaaactacacaacactgtcaaccaagtagatctaattgacatttgtttacctaatgacagcagaatacacattcttttcaagtgcacatgtaaattcaccaagataaaccacattctgggtcataaaccaaatagtaaactttatatataagaagaacacttctaaacaatccatggattaaaaactctcaaaggaaagctttgaatattgtgaactaaaccaaaatgaaaactcaacataccaaaatttgtgggatacagccaaagacatgcttagatgcattagctgccttaattagaagagaaggtctcaagtgaataatttaagcttccacctatgaaactagaaatgaagagcaaaataaacccaaattaaacagaagaaagaaataatagagaacaaaaatccatgaaatagaaaacagaaaaaaaagaaaaaatcagtgaaactcaaagctctttaaaaaaaaaatcaataaaattgtaaacctctagccatactggcaaaggaaaaaaaaaaaggaaaacaaattaccaatagtagaaaagaaaaaaaggaagacaaattaccaatattagaaaagaaagaggagataaccaccgtagactgtacaggcatgaaaaggataatacaaacagctctacagatagaaattcatcaacttagatgaaatggaccagttcctcaaaaaccactgtattagctttctatttctcctgtaataaattacaaatgtagtgactttaaaacaaaaggtttttatttacagtcctggagacagaagtctgacatgggtcttactgggataaaatcaaattgttgacaggacttgcattccattgtggaggctttaggagagaatctgttccttttcttttcctgcatctagagtctgcccacatttcttggcttgtggcccccttccgttttcaaagacaacaagtcgagttgttctcacatcttactctaacttcctcttttgccacatccttccacatttaaggaccgttgtgattacattgaacccacccagattgtttttttttttaagttcaactgattattaaccttaattccatctgctaccttaattcctatgtaacatatctttacaagttctggggattagaacatcagtatcttggttgggtgggagggggtcattattctgctgatcacagccacaaactatccaaactcacccaagtagaataatatttcaccttttacgtctggcttatctcacttagcataatgttttcaaggtttattcctgtgtcttcgttgcttttttttttttttttttttttttttttttttttttttgagtctgagcctcactctgtctcccaggctggagtgcagtggtgcgatctcagctcactgaaacctccgcctcctgggttcaagcaattctcctgtctcaccctcccgagtagctgggattacaggcgtgtgccaccacgcccggctaatttttgtatttttagtagagacgggggtttgccatgttggccaggctggtcttgaactcctgacaggtgatccgcccgcctcggcctcccaaagtgctgggattacaggcgtgagccaccccgcctggccctcgctgcattttaataaagatacaaaagctaattcaaatggaaaaaggatattcttttcatcaaagacatgaacaatttaacatttacatggaaaaataaaatcctcaacctttacctcatattttatataaaattaactcaaaatggatcatacatctgagtataaaacctgaaactataaaacttttagaagaaaacagatctttgtgacctggggtttggcaatgagttcttaagacatgacaccgaaggcacagtgcgtaaaacaaaaatttgataaattgggcttcatcaaaattaaaaacctttgttctgtaaaaaaaaattctattaggagcatgaaaagacaagctatacactgggagaatatatttgaaaatccggtatcagaaaaagaacttgaatccagaatatataagaaaacacagcagtaatttaaaaactcaattttaaaaggggcaaaagatttaagtaggcttaaatagacatttcaccagataggatacaaggatggcaaatatccccctgagaagagttcagcattgttagccattagggaaatgcaaatttaagccatgatattgcatattagaacagctaaaatttaaaaatacatagtgatagtactaagtactggcaaggatgggaacagctggatctcttagcaaaatggtgcagccactctggaagacaggtagaatcttaatcatacatttaccatgtactcaactgtgtcatatctagatactcattctagagaaatgaaagctcatgttcacatgaaaacctgcagacacgtgttttatagttttgtttatagttgtcaaacctgaagacaatctaaatgtccttcagcaagcaaatacataaacaaattggttgttattcagaggaataataggaataaaaagaaatgaagtattgatatacaaatgtgttggggagtcctataaccacccatatgcttgaagatttactaggacttatatgattcactgtatagttgtactcctcctaagatttattgcagcaatatggtaaggatacatagttggatcctaaggacacacatggagtctggaggaatccagtgtcttgataattttttctttttgcgtggtggaggaggtggtgtggggggggacgaagattcactctagtcgcccaggctggagtgcaatggggcaatcttggcccactgcaacctccacctcccaggttcaagcgattctcctgcctcagcctcccaagtagctgggattacaggcgcacaccatcacgcctagctaatttttgtatttttagtagaaaaggggtttcatcatattgaccagacttgtctcgaactcctgacctcaggtgatccgcctgccttggcctcccaaagtgctggaattacaggtgtgagccaccgcacccagccaagaggattttttcattttaagtgcagaggcaggaggatcgatcacttgagcccaggagttccagaccaacctggacaacatagggagacctccatctctacaaaaagatttaaaaattagccaggcgtggtggcccgtgcctgtggtcccagctacgcaggagactgaggccagaggatcacttgagcccaggaaattaaggttgcagtgagccaggatcacaccactgtactccatcctgggtgacaaagcaacacaacaccctgcctgaaaaaagaaaattgcatttatatacattcaagtaacttagaaataacttgctgctccccagtcactgcttgatgtagctttactatttgttatgtggtattctcacgtcttttacacaattgcaggcagaatagttggtgtggcagtcgtggctgtgtaatagtcttttctttaaacatccattttgaatacaagcgaaaatacccacttatcttttacccaattcactgtatctagtagagcagcgattcttaaacttcaatgtgcattatagtcagtcacatagagggctttttaaaatatgaattgctaggccccacccctaagagtttctgattctgtggttcggggttgggctgaataatttgcatttctaacaagtactcagatgatgctaatgatgctggtcagggaaccaactttgaggactagtttgttagtggatttaacgcctacacattagtatcacctgaggagtcccccatccctacttctttttcacaactggcccttgtccagttaagtaaacgtgtttggaagtcctgctcaaacatggtgttaggattttatggtccttttcaacagatgcagctccataacaagtgtagactttttattttttactccaaatcttcataacacttgtgtgatgaatataaacagcaggattggccagctgtgtggtttggtggttttagttcacataaatctgtattccgtcaatagctcactttttggtcttggccagttcccataagtgcctgctgtagatggcttgttaattgtaaggagtaaatagtaactacacagtagagtaattggctgtcactttgggtgatcaaaattaacatcaccaatgaagggaagatggacatcatgtcttttcagacatctggaaggataaacatcacttatacagtagtttgacaacattgtttaaacagcagttcggttatacttgattggaatctgatcataagggaaccaacagatccagattgagaagcattcaatttttaaaaaaggaccttattcttcttaaatagcaatgtcatgaaatataaagtttgcagaactattccatatgaaaggagattaaagagatctgatagctaaatgcaaaagtgatcctaagctgggtcctgtaactgaacggaaaaaagtgctatagaggggatagtattgggtcatatgataaataggaatatagatggtagattaaataaaaagtattgtgccaattttgaatttcctgaggttgataacagtactatggttagtactgttccttaggagacacgctgaaatatttgtaggcaaaaatacctgatactgcaacttaaatgagtcagaaaaaatatgagatggagcaaatggggcaaagcatacaggtgttctttccaacttttttgaatctggaattattcccaaatgaagttataaacaaaaaaacttaggctctttatttcaggatagttgtaaagataaaaaaactacataaaaatgtattgaaagaacagaatgctttacaagcagtgcttcatatgctgctgaatctaggtggccttgtagcacattctgtaggtgtccccagctacactgtgggtgctagagagcctgcaggaggtcagcatcctcctgatttgtaactgccccttcccctgctcagtacagcttcttgaatgtgtcttgtgcagtacttcagacacactgaagcataaaatacaccctatctaaaaattcattctatcatagtagctaattttagtttgttttttgctgactaaactattgtgtgactcacctgatcatagtcttttattatatattgcatgtacattagctttgaaaagtatatttctctttcagcccaaaatggagttaatcctgactgggagaagaaagtaattgagtattttaaggaaaagctgaaggaaaataatgctcctaagtgggtaagcttattgctattttcgagggagagggttggacagactatacagtttctcttagtagagtaactaagtaacccacatgtaatttaaaaatatgtaaattaatgtacttctgcttcaagtacatttgtattaaaagattttggtcttttgctaattaagtttaagcatgtaaatacttatacattatgcctctaggtggcagtaactgactgttacttcctgagacaaatctttagttgcaagagtgtcagttacctttgttttattaccttcattttaaaagaattggcatgtgctagttttaagagaagagctcaacaaagtaaatgcctttttgatcattgaaaagtgttctgaatgaaaagcattttttagcattcttttacattgtggtcaaatgttatctaaaacttgaaagaaatggaagagaacttgggttccagcaattatattgaccattgagatcatttggctctctgatgtggcatgggtgtgtgtgtgtgtgtgtgtgtgtgtgtgtaacagtttgagtctggatataaagtttgtgtatatatgcttaatgttgtatagacaggatatttagttgactgacttgattattttcctttaaggtaccatcactgaacgaagttccccttcattatttgaaacctaatagttttgtgaaatttcgttgcatgattcaggatatgtttgaccctgagttttacatgggagtttatgaaacggttaaccaaaacacaaaagcacatgtaagtattgctgttttcatgaatttgtggtattaattttgtccttttactgttggtggtagttttggttcagatatattgatataattctgtttttctatgtttggggtcataggttcttcattttggaaaatatagagatgtagcagagtgtggggtatgtatctttaatatatatgaaacatttttagtaagaattttttcctaaacagagaatttgtttagctaatcttaaatttatttatcttgtgtataagttacaagaaatcatgtgaaatgttttccttatttggttttatttaggagtttgatgtgacttttttttaatcctctaaagatcttttgaaggggaaatactgttaatgccaaaattaattcctctctccaatatctgtatataatatatgtaaaacaaagaaccctaggttgcaaaattaaatcctttttaattccttcaaagacaaagccaatggtaatctcactgtttctttcatagaaagctgtcagaatcagcctataatacagaaatttaatgaaatattcattcctaggtagctcggagatgagattcaaaagtcatatattattccctaggaaaggcatgttctctttcagatatacttagaaaactctaagaagtggaaaggacccaggagacatcaaatttgagcctaatacatacaagcaaggatttttttgtttgcctttctttctaggcctaaggtacctttctcctagaatgagtcttttatttatgactcttgagcaacatgtgtaccaactctctgttagcctttggtagtgtcacacatggacagcctcatctattttattgacccatttccagatgctgggattaccgagttacattaatacacagctttttatggtatacagtaatgtaatatattagcctaatgtgttaggactccttaaacaagggatactgtaatcattaatacagttgatccattaggcttggcacagtgtttattttatggaaacactctaaaagaaaaacagacctgaagttcatcatgtgtaaggttacacaaatctatctttcaaatgagttcattactctaaataattgtcagaagttacatttttgtttaatataatctttgcagtaaccttccaaattagggcaatttttctgtccagatctgcctactgaactagaatatttaatgagcaacaacttctgttgtgaattaacggactgatattggggtttgataaatcagtttcctaaggtttggataagccaagagttagactctaagaatataaaaaggcctagataacatcataaaagtaaggttctagatccacaaagcagagaactagacccagattataagtcactccagaggtcccatttttctggatttgagggaggaagtgtttgatgacagtatttgaagtgattttatatccattttcttttaaaaagtaatagtttggaattagttacttgttaattaatctgtaaaatatttgctgtggtgttataatgtgaaaatgtggttgctaattttaaaataaattttgggttttttaaagtaaatttttaaaaacactttttatgtatatcacagcctcaacaagaacttgatttaaactctccacgaaataccactttggaaagacagactttctattgtgttccggtgcctggggaatctacgtgggtaaaagaaatatcctttatctgaactttcttactgtgttgatggtttctaaaaacttagcctttaattattcttcctttgcaaagcttggctttattttaataaagtgtgtttcatttgttctaattgagaaaacccataaaacgggctaagtatttgtcactgagtaatgctaaaataacagtacattcctatagtgaaatactgttaaaatgattgaagtaattttttttttttttttttttttttgagatagggactcactgtcacccaggctggagtgcagtggcacaaacatggctcattgctgcttcaacctcctgggctcaagcagtcctcttgcctcagcctcccaagtagctgggaccacaagcgtgtgccaccatccctggcgaattttttgatttcttgtaggaacagggttcactttgttgcccaagctggtcttgaactcctgggctcaagtgatcctctcacctcagcctaccagagtgcatgctccgcctaaggcacatttaaaggtactgaaaaaatatgataattaaagtaaaaaaatagtttcaaattggaattcattctaattaagggaagacaacgtgttggctcttttgagaggggattgtagaaacatttcctttttatttacgatagtaattttttaaggcatggcccacctacactgaaatgcacagattttaaggtaatgcacagtgatttggataaacacatacacctatataatttataccccaaagtaaagaacttgtgcctaaaaattcctttctgcctttttctagtcactacctcctcccctgcaagcacaatcctgaattcttgactatggcttggtcttgtctgttgaatgacatctaaatggactcatataatatatagtctttgtgtctgacatcttgtgtttaacatcatgcatttgagtcatgtgtgtatcagtagttcttcatttctttcttgttttcttttgctaagtattatttgtttatacagtctccaattgagcatttaggttatttacggttttaagctgggcattttctttgtgagaacattttaaactaccaattcagttctttttgtttgttttttgtttgtttgtttttgttttcttgagatggagtcttgctctgctgctagtctgaagtgcagtagcgtgatcttggctcactgcaacctccatctcctgggttcaagtgattctcctgcctcagcctcccgagtagctgggactacaggcacacgccaccatgcccgccagtttttgtatttttagtagagacggggtttcaccatgctggccaggatggtctcgatctcttgacttcgtgatctgcctgcctcggcctctcaaagtgctgggattacaggagtgactaattcagttttttaacagatattttgagtcagttgtgataaattgtatctttcaaggactgttttgaagtcatttaaacccagttgttgaatttattgacataaaacttgtcagagtattttctttttaatgtctgtgggatatctagcattgatctctttcattcccaataatgttagtctatttttcacttcaattttctgttttctgcttcatccatttctgctttattttgttctttttggtttggttttaattggtctttttctagccttttttttttagacggggtcttgctggctctgtcacccaagctggagtgcagtggcacaatctcggctcactgcaacctcagcctgccaggttcaagcagttctctgcctcagcctcccaagtagctgggattgcaggtgcctgccaccatgcccggctaattgttttgtatttttgatagagacggggttttaccatgttggccaggctggtcttgaactcctgacctcgtgatccacctgcctcaacctcccaaagtgccgggattacaggcgtgagccaccgcgcctggccctttttctagctttttaaagtagatgctcagattattgatttcaaatttttcttattttctaatgttagcaactaaagctataaatttctccccagtcactgctttggttgcatcccacaagttttcatttgttaggtttttactgtcatttaattcaaaatattttctaatttcccttgtgatttcttctttgatccttcgcccttgcaacaatctgcttctgtgtagtctcattcttcgtgctatttttgtcatagatttcactcatccttagattatacagctcacaacatactatttttgtttttaacagtcgtttgtcttttatataaattaagaagcaagaagaattcatctttttttatatttggcatcatttcctttagcgatattattatgattatgattttattttattttttttttttttttttttgaggcagagtcctgctctgtcaccaggctggagtgcagtggtgcaatttcggctcactgcaacctccgcttcccgggttcaagtgattctcctgcctcagcctccagagtagctgggactacaggtgtgtgccaccacgccagtttttttgtgtttttagtcgagacggggtttcaccatgttggccaggatggtcttaatctcctgacctcaggtgatccacccaccttagcctcccaaagtgctgggattacaggcataagccactatgcccggccagcaattattttttttttaaatacagatctgttggtgacgaattctgtcagtttctgttcaattgaaaatgtcttttattccaccttcattttgttttatttatttatttatttatttatttatttatttatttttgagacagggtctctccctttgttgcccaggctggtctcgaactcctgagctcaagtgatctacccgcctcagcctcccaaagcactaggattccagatgtgagtcaccacacccggcctcaccttaatttttgaagaacattttcattggatatagaatttttattttttattttaataatttattttaaaaaaacagaccaggcacagtggctcatgcctataatcccagcactttgggaggcagaggcaggaggatcacttgaggccaggagtttgagaccaacctggccaacatggcaatactctgtctctacaaaaaatacaaaaactagccgggcttggtggtgggcacctgtggttccagctactcccatggcttgagacgggaggatcacctgaacccagaaggctgaggctgcagtgagctgaaattgtaccactgcactccaacctaggcaacagaacgagactgtctcaaaaaaaaaaaaaaagaaaaggaaaaaagagatgagttctcactgtgttgcccaggctactctcaacttcctgggctgagtggtcctcccacctgagcctcccaaagtgttggatttacagatgttagccactgcatccacctgggatttgttaggggtggtgtagaacagcccttgttgaacagtagatcatccttattcatgaggtctgctatttctgggtcttacccaaatgcctaggatgactagtagggtccattatagtattatactacttccagagtctccatttaactctctgccaactagcagctgttctctgctagtcctcagggagtcttgacttgtatatccacaatttagtgttttgtcagagatccaaatggaaccttcagggtcttttatccgtaactacttcctttctagtacttctctgcaaattccagttgcttcactagccctgaaccatgtgctctgtcttctccacccagtaagagagggcctctactgctctttgttgcagtttggagaacgtctccaggagagagctgggagaatttggagtttacctgctgtgtttctcctcattcaaggatcataaccttatgctccctgttgtccagtgactgaaaacagttgcttcacatattttgtccagttacattgttgtttacagcaaggatagcagcataaggttgatacctgttattctcatgaccagaactggaagtctagcctccttttatgaaaatgcattctattttaactgaattgccaaactagtaattttttataagtcatataattagcaaaactttaggatattcctcagtttatgatagtcttttcttaacttttcgtttaacgcctatgttaatgcaaaccaagctcgagtcagtccctcaacatcctacactcctagtcgccacaagaggagttatgaagatgatgacgatatggacctacagcccaataagcagaaagaccaacatgcaggtgccagacaagcaggtagtgtgtgccaacaggttttctctagactttgctctcttacagtagattggttttcagagtgaattgttacataatatagctctatatttaggagctggcaatttatcagagttacagacatgttgagagtttttacagtactctgatgagactgtgcttcgcaaatgagcaattaggcatcactttgtgacaagtggctgctctgatgtatgtgtttggagtctcaagtgactatctggaaaggtcttttctatcttcatatttatttttaatacagaagcctggtactttaccctaaaaatgagttatttttatctgaaaacatgctttctcattttctttttaattttcttgtttgtttgtgttttgagacagggtttcactcccatcacccaggctagagtgcagtggcataatcatggcttattgtagccttgacctcctgggctcaagtgatcccctgtcacttcaacctgcctagtagctaaggctataggcgcatgccaccacatgcagctaactttttaaattttgtgtagagatgggatctcactatgttgcccaggctggtctcaaactcctgggctcaggtgatccttctatatcagcctcccaaagccattggcataacaggcgcgagccaccacgcccaaccagtcttagcttttataagcagtggatttctttgttatggtgggtatataagtttgtctttatatttgtaatatattcgagtttgtaatatattcgagtatgtgctatccacttcccttcagcacctttaatcagaaggaaaaattaaaggacaaggaggcaaaacaaatcagtctggtcatttactatctgcaagattgggtagagaaggcttttttttttttttttttttttttttttgagacagagtttcgctcttgttgcagtggctggattgcagtggcacgatcttggctcactgcaagctccacctcttgggttcaagcaattctcctgcctcagcctcctgagtagctggaattacaggcatgcgccaccacgcctggctaattttgtatttttagtagagacggggtttctccatgttggtcaggctggtcttgagctcccgacatcagatgatccacttgcctcggcctcccaaagttctgggattacaggcatgagccactgtgcctggccaaggcaaatttaacagtcagtggtaaacagggatttactaatgaattttatttacccttatattactctactttataaattgatatttccagattttcttaatgctaagatatattttaatgtgtttaaaattggaatgttttactataaatacatataaatgtcgtagtattctttttctccaccgatccccagaatatattaaaattaatggtctatcatctagcctggacagcatggcgaaaccccatctctactaaaaatacaaaaattagccaggcatggtggcaggcgcctgtaatcccagctgtttgggaggctaaggcagtagaatcacttgaacccagaggggcggaggttgcagtgagctgagatcatgccattgcactccagccagagtgacagagagactccatctcaaataaatatcatagtaacttatatattgtaatatattcgagtgtgtatttaagtccaggaaatatgttaattctcttatcacttaagcagttgatgctactttttatttcttaccattcttgtttgaatgtcttaatgcaggctttttatgcatttgagtactttatttatataaagtaacacttgttggtgtttagtcaatgttttaggctatacatatttttaaactttttattttgacacagtatagacttacatgcagttgtaagaaataatacagagaggctggttgcggtggctcacacctataatcccagcccttcaggaggccgaggcaggcacatcacttgaggtcaggagttccagtctggcaaacatggtgaaaccccatctctactaaaaatacaaaaattagctgggcatggtggtgcacgcctgtaatcccagctacttgggagactgaggcaggagaattgcttgaacccgggaggcgaaggttgcagtgagcgctgatcgccaccatgctccagcctgggtgacagggtgagactctgtctcaaaaaaaaaaaaaaaaaacagatcttgtataccttttagcctctacttcccccagtggtaataccttacgtaattatagtagaatgtcataaccaggaagtggatattgatacaatcattttttttcctttttttttttttttttagacggagtcttgctctgtcacccagactggagtgcagtggtgcaatctctgctcactgcaagctccgcctcctgggttcacgccattctcctgcctcagcctcccgagtagctgggactacaggcccccatcaccacgcctggctaattttttgtatttttagtagagacggggtttcaccgtgttagccaggatggtctcaatctcctgacctcgtgatccacctgcctcagcctcccaaagtgctgggattacaggcttgagccactgcacctggcctgttctttgcagttttatcgcataggtagattcatgtgaccaccaccacagttaaaatcgggaatatttcattacccagatctctcatgttgcccttttatgctcctaactaccactctcctgcctcctccgtccccagaagtctctagaccctagcaaccactggtctcttctccatctcttataattttgtcattttaagaatggaattgtatattacataaactttggggattgtcttttcttcagcacaattcccttgagatccatcccaattgttgcatgtatcagtagtttgtccgttttattgctgagtggtgtttcgtggtatggcaggctataatttgattctcatgttatcagccctaaagtgtaactacttcaggagttggggttattcttttaatgacctgtatatccccaacaactggtttgattcctggtacatactggatattaataagtatttggtaaattaatttattgctgtatggttttattctgcttaattaatagaaaaagtatgttctaccaaggagttttgctgtcggtagaccatgtattccttaaatcaaagatgtcaaagtaaccatattgcaaatcaacttttgaaactggttatacatgagatttgatgggaggaatttgttgatatcttacagtaagggaaaaaaaagtaaaatttttagatcttcatgtttatctttgtcctcttacagatcaaacaaaagactttgttagtatgtgctgtttccttaaaaactgtaacaacttgaactttgcaagctcagaagcatcacgtatatcaaacttgaaaggcacttatggaatgttctttttctccaggaggccttagaaatgactaagtgcaatgctatcctttgaatttagggagtgttggtggtcttcaatggtgtggagagccaaaacgtttagaaactgaagcttctactgggcaacagctgaactctctgaacttgtcttctccttttgatttgaattttccattgccaggagagaagggccctgcatgccttgtgaaggtaataaaacctttcgtagatccaacactgaaatgttatgtgtctcagaaagtagcttagtgtctgagcatttgcatttgttcccttgtgctgggctagctatagcaaatcactgcaaatttaatagcctaaagcagcaaaagtttatcatcttacaggctttaggtcagaaatccaacatggtctcactggggtaaactcgaggtgccagcagggctacattcctttctcggagcccctaagggagaatttccttggccttgtggctccttcttccatattcatagccagcaacattgcatttgtctgaccatttttttcatgttgacatctcatctgaccacaaccaagaaagtttccccaattttaagaatccgtgtgattacatggggcccagccagttaatcgaggataatcccccccatttcaaggttattaatttaatcacacctgcacattccttttgcatgtaagctaacaagttaaaagaatcgaagaacatctcaaatgcagaagcagaacaacttttaaattatgtctgttcccttcctgtatcatttctaacataatatcttcttcatttttgtcttcttccttctctcagcaaaacctatttttcacttatatttaaaataaaacagaaggaagaaaacttttaatagtttgttcttccatcttacttattctagtgttttgatcctgataaatgagcaagtgatagaaggttcagaaatgattgttaaggatttctatccttattctttgtgcattttgggtttttttgtttttggggggtttttttgtttgtttttttgaggcagtctcactctcttgtccaggctggtgtgcagtggcacgatctcggctcactgcaacttctacctcctgggttcaggcaattctcgtgcctcagcctcctgagtagctgagattacaggcatgcaccaccacacccagctcgttctttatattttttgtagagatggggtttcactatgttggccaggctggtctcgaactcctgacctcaagtgacccacccacctcagcctcccaaagttctgggattccaggggtgagccactgcacccagattctcagtggttttaactgaaatgacacttaagtcatatggcacagggaccaaaattaccattttttcccctgccttgcttctaccaggtctaatcagtaaatggccttgactattactaagtccatcatgacagacaattttgaaaggtttttttttttttttaaattgtgaaaaatcttctggccattccaagttttgtgttaatccgatgttgcagtttatgaataaatgcaaagttaatcatcttgtttttgttttttccttttcttggtgtggtttaataggttttgagatagtgcacagttctagttttaactgtcagcctttgggaaaaggctttttttaattttaggaaaagccttttttttttgtagtactgtggtatattgaaaacagacattagtctggaagttaggcatcctgtgttttggtttttcacttatttgctaactagcagaatgactcttggtctcaatttataaaaatttataaaataaaggacttgctttaaggtctgtttcctgatctaaaattccaagatattggtacttcaagactaatatcttaagctttgtgtctgttctaacagtgtgatttcatgtggtctcttgttaggtttatgaagattgggattgtttcaaagtaaatgacattcttgagctatatggcatactgtctgtggatcctgtgctgagtatactgaataatgatgaaaggtgagtctgtgtgctctttttttggtctcctttatttttatataatttcaagttttcaggagagttacaggatggttttaaagaactcccttttccctttctcccagatgtaccagttgtaaacacttgcaccccatgtgttttgtcattcatttgtgctctctatgcacacatttttctgaaacacttgaaagtatgttgcagaaatcaagcccttttacccctaactgcttgtcaacatttcctaagagtactgactttctcatatataattagagtacaggtatcaaaactaggaaatttgccacaaatatacaatacactaatccacaatctatacttaatttcactaattgtcttaatcatgttctttcttacacgtctcccttctgcatcccccagtccagggttcagaagctcgctcattctctatttctactgagttcatactgtatttctgattccagttcagcaccacaggtgtcgttctgcttgttctcctttctgtattagtgtaactctcttaaacttgattcccatttttcacaatcttatcatttgcacatttttacaacatagagaagggaatttcagaattgttaactcatacctttacaaaacataaacctaaataactagagttcaatctgaaacagtcctcagcctttgtctttcatggtcttgccactttttttttttccttaaacaacagaaatatatgtcttccagtagttctggaggctgggaagtccaaaatcaagttcccagcagatctggtttctagtgagggcccgcttcctggtttacagatggctgtcttctcacgtggtagagagcagacagccttgatgcttttgaagagtgtaagccagttaccagttacttgtttcctcatggttagactcaatgttttgcatttttggcaggaatattacagaattgatgtatcctcagtatgttacagcaggaggcatgcgatgtcagtttgtccctttactggtgaggttaattttcattagttggttaaggtggtgacttccagatgtctcttctgtaaagttacatttctcactttgtaattgacaagtaacttggaggaaggtacttggggacataaatatccagtttctcattaaactttcaccaatttattttagcattcattgatgattcttgcttgaatcagttattactttgttggcaattttctaacgcagtacatttatttattggcattctactataaaagatacctcttccatttgtttattcaagtaatgtatttacttatatttagtatagactaatagattctgattttattcaatgttaatatcattattttatttcgagacccaaattttcccagatttggctagtgggagccactttaagcaggtgccgggtcctttttttgagatgatgttatcattttttaacatttattttctggcatattaagctgttgcagcttcatcgtatgctttgaagatctgagtcctagatgtgctcgttggtactggattagatttgcatctaggcccttaaagtagacagagctaggatacatgcagcatatggatacatatatacgcacccacatttaaatgcacacatacacactcacatgcatgttttgtgtatttctaatgtctgtgaaaaaccatgggttcatatttctgattccagttcagcacagcaggagtcacatgttctagttgttctcctttctatatttatgacttctttttctaacaaatttgattcccattattcacaatctgttgtttccccatttctaccatatacagaagggaatttcagaattggtaacccataccactacaaaacagaaacctagtaattagagttcaatacatttccagttcatttttattttagaatgcagctgtgtagtcagagctatgttccacttactcaggtaacttttcttccccttcagtgtgatttcattatttattttacttagaaagattctcagaggtgtcattctcggctatccccattcctgctgtctgttcccacccagcctccttagggaaccacagtttctggtttatccttcctgtatttatttttttacaaaaatatgaagatacgtatacattttatttctacctttttcttctataaaaggtaacatggtatatatactcttacactttttaattttttttattaacaacatatcttggaaatctagaccttcctcattcatttttgttttgttttgagattgccaaaagcaagggctgatgtccctcatctacaccagagtcctcttgttgaataccggacattaatcatcttagtttctgtgtaggatgaacttaacatttttcacagttaaaaaaaaatggtacaaaacaaaaattttaaacaactttaaataagcttaaccgtcccttaataatagtatatgagattgttcatcttggcaatttctgattgtgatgactttcctgctttagttacttcactattgatgtagtttagtttagaggttgtattaggggtctctaaagggtcagaactgataggatagatgaatatatgaaggggagtttattaggagaatgactcacatgatcacaaggtaaaatcccacaataggctggggagcaaggaagccagcctgagtcccaaaatctcaaaagtagggaagccaccagtgtaggcttcagtccgtggctgaaggcctaagagctcctggtgaaccactggtgtaggtccaagagtccaaaagctgaagaacttggagtctgatgtttgagggcaggaagcatccagcatgagagaaaggtggaggcggaagactcagccagtctgctctttacatgcctgcctttatgctggcagctgattagatgctgcccacccagactgagggtgggtctgcctctcccagcccgctgactcaaatgttaatctcctttggcaacaccctcacagacacatccaggaacaataattttcatccttcaatccagtcagattgacaaagtattaaccatcacagaggttaagagcacagacaggcaggcagcctgggttggagtcctgacttggccacttactagctatgtcaccttgggcttggtttcctcattgtaaataagggtagatgtgaggttttggtgaatttgtacgtgtaaggcattgaacgttgtctgtcacatggtacgtactatggaaaaggttattatgcttgtattaaaaaatacaggagtatgaatttattacttcagtgtctatagattctataaagtcaagatctaaaagattagctatttgttttggtcgtctcacaaatctatcatctgcagatttatttagcaagtctgaaaaattcatactttcattgcttgtctactcagtcttcgagggatcatgtaagaattaaatttaggaaaaacaattagcaagataagagatgaatggattctccacacgctgaataatagataccagatggcttttgagaaaaagaccccagtttttgagatctgctgtcaagtattcgatgtcccggccaatagttcaaggagtacctgtgttttgaaatagccttatgagtgacatcctacattccatttattgaagtgctgaataacaaatattattgtttctggccaggcatggtggctcacgcctgtaatcccagcactttgagaggccaaggcaggcagatcacttgaggtcaggagttcgagaccagcctggccaacatagtgaaaccctgtctctactaaaaatacaaaaattagccaggcatggtggtgtgcacctgtaatctcagctactcaggaggctgaggcatgagaatcgcttgaacccaggaggcagaggttgcaatgagccaagatcgcatcactgcactccagcctgggcaacacagtgagactccatccaaaaaaaaaataaaaataaaaataccgttcttgaaaaattgaataaatgcattatttcatgatatgtcttaacaagcctgaagtctgtgtgatgtaacactttagaatgagaggccactttctgttctttaaggagatgtacaggtggaaatattcttggctttaactctaattttgttttccaagatgcacattatttttgcatctgtgcaattgatgtctctctaaattgaaactttatcacctctccacagggatgcctctgcactgctggatccgatggagtgcacagacacagcagaggagcagagagtacacagtcctcctgcttcattagtgccgagaattcatgtgatcttagcccagaagttgcaacacatcaacccattattgcctgcctgccttaacaaagaggagagcaaaacctgtaagtgtaagtgttacagcctagtcaactatcgactgttagcctcagtgtgtccagagctgcctgtaacgtgctcatagtggaattgagagtcaggtcttcattcctcacaataagtgttttcagtaatctctctctcgttgccccatttttctcttacattaattctcttcactgaaatgaggacaaaagagtatacaaggctgggtgcagtggctcacgcctgtaatcttagcactttaggaggccaaggtgggtggatcacctgaggtcaggagttcgagactagcctggccaatatagtgaaaccctggctctactaaaaatacaaaattagccaggtgtggtggcgtgtgcctgtaatcccagctactcgggaggctgaggcaggagaactggaggcagaggttgcggtgagctgagatggcaccattgcactccaggctaggcaaaaagagcaaaacttggtctcaaaaaaaaaaaaaaggaggatgcaaactgccttatttttaagattagcatcacttactgacggatatgttaagctttacctactgtcgactgaattgtgctttgctcacgtagttatttttttacctaagacacttgagaggaactggagtgtgtgtcctgactcaggtcttcctttctccttcagttgtttcaagtttcatgtccgaattgtctccagtcagagcagaacttcttgggttccttactcatgcccttctgggggatagtttggctgctgaataccttatattacatctcatctccacagtgtaagtgctgtatcctggtgggaattaggggagtttggtgtgtgtggaagtggaagagcgggaagattgctggtgtcatttgtgtgttttccttattgggcttcatcacatggtttttatctgtccagtgttaactgttataccaaatcacagacaaattccttttctcacagttcacatttagcattttgattatgtccccttaaattttagagccaaaatcagataaagcagtggtccccaaccttttaggcaccaaggacccatttcatggaagaccatttttccatggaccggagtggggatggtttcagtatgaaaccgttccacctcagaacatcaggcattagttagattctcatagggaacacacagatgtgcagttcacaatagggttcgcgctcctgtgagagtctgatgccactgctgatctgacaggaggcggaactcaggcggtaatgcccactcatccacccctcacctcctatgttgtggcccggttcctaacaggccatgaaccagtactggtccacggcctgggcgttggggacccctgagataaaggacctggctgatgagtaaaatgagctgttttatcccttttgcattctgaacgctctgtttatacatcccaaggcgcccacgtcatgtgcacgtttaacgtggacattgacactagcaccgcatcccttgactccactgtatttctttgtttctcattttaaaactagtgtgggcctttgacaagttccaagaacataaggaggaaaatgcacatcatctgtaatttcaccacttagaacctccgttaacctttaggtacatgttcattggtttttgtttacatatgtatacatccttgcataggtcttagttacactctaagcacagatgcgtgtcttgttttcagcagttgatatatattaaacattttcccatcataatgcttcatgaactttgtagtggctgcaaagtatttcactatgcagttgtaccatactgtaaccatttccctaaatgttagcttttcctagcttttctctattataaagttgcaggaaacatctttgtgctgtaaatcttatcttttctcaaatcagtctgtgacagtagtacataatggttgagagcacaggctctggaaccaaactacccggattcatatcccagctctgtcagcttccatttagatgaacatgttgcttattatcatctctgtgcctcggatttctcatctgtgaagcaaagacaacagcacctaccgctgaatggttaggggttaaatgaggaagcatttacatactcagaacggtctttggcacgtgaccagcagcacttacgtacaaatattggctattacttttattgctgttattctgataaaataactggtcagaatattctggtttatttttaatgacaatattaagctaatttttctattcttcgctatttgatagaaatcaggaagtcacttcagcatcttattgattgatttctttcttttctagatatacaagaagagatgtccttccactaggaaaatttacagttaacttgagtggttgcccacggaatagtaccttcacagaacacttgtatcgaattattcaacatcttgttccagcagtaagatgaatataaatatgtattataaacctaagcacacttaaaaaatccatctaactgtctttcattcacttcaaatatttaacttagagattttaatagatcttatttaaggggaaacaaagcctgccaaattacataatttaaaatgtacgttcccctaaacatttcacttttttttgtctttttgcctaagcacaaatttctgtaagtctaacaaaacaattgtagtaactcccttaaaattacactctcttgataccaatttgtccaatttggtatcctttttgtacactaaagtcttaaatctaaataaactctaaattgtaggagcataattcttttagttgaggtaataaagttctttatctccattgcctcaattttaattcctgtttggaaagttgagctcactttatttgccagggtatctggaatgcagtatttgcgtggtggtaggatcttgggaacaggggaattgcttctgattagttgtgtgactgaaaatactgatcacttctttggaaattgaagagggtgcactagatctttattgaaccgaatgtattcagtgtctcagtgctaacactcgtccaggccctcaagaagcagaagtggactggaatataccagcagttctcagtctccttagactcactttacactctgaaaaatgtgttcatactcaaagagctgtttttcacgttatgattatatttatcattaatttaccaaactagaagataaagtaaatacacctattaaaaataaaaaattacatataaatatttttataaaaacaacttttcccaagccaaaaatgattagtgataaaggtgacattgttttacattcttgcaaatctcttcaatgtctggattaataggagacaatggatgcttgtatctgcttctgccttcagtctattgtagtctcaggttttggttgaagtatatgaaggaaagctggcctcacacagatggaaaagtagatggtaaaggaaggatggtttcgatagcctttgcagataactgggtggtggtctttgatactagaccaaaactgtccacatgagattttcttaaagatagttaagtgtggaatctgaaatcctattcgtaaactttccatagtctgctatggtaaaattcattagtctcgcacattgaaaggatcttttatccatgcatgattttgacctgattgaccctgtaaaagggtttaagcaattccctgggggttctcgggaccacattttgagaattattgaaacagatcctttgccctcacagagtttaggtagaagaccaacaaataaattaatacatggtaggtcatttaagcacccctaagctccccgttttcttagaatcactgaggtaatacacaaaactcctctaaattttcgcaatatatcttacctcttccttgacagccttcccccaccataccctcttctccatccctgccacattgtttgaggctggagggatggaagaatggattggtgtataaggcagagcacagagggtgttgggaatggtggctcaagagctggaggaggagcatagatggttcgcttactcgttaaacactgagtgagaaggtgctcgcgtcctggaggcacctcctgagagctgcaggtccatccacagctcagtgtgctctgctccttgatttttctctgaaaagtttgttcaaaaatgtctatgataaatgaatacaattttaactcaaagaatatagaggaaaattaagcttttctctccctgtcttgaagagtaaaattaacattttctttttgctagctagcttgtgttaggtgaaagaggttaggttttggggtatttaatatttatatgtcagttatctaccatttgtttcattggttaaattaaaattgattttcaagaatattgaacaagacatttgagaataaagtagctcataaaatggatgaaattcaaatgtaagatctagatactatttttgcttctggagttcaagaaaccatatcactactcccttagaaatttataagatcactttttccatatgaaacacaatgtttaattccaagtacatattttcttaaaacagggaaacttaaattcttgttcactaaaaaatttctctttgcagtcttttcgtctgcagatgactatagagaacatgaaccatttgaaattcattccccacaaagactacacagccaatcgcttggtcagtgggctcctccagctgcccagcaatacttcccttgtaatcgatgagactctcctggaacaggggcagctggataccccaggtacgtacatagatgtttctcttccatttctgacttccttcgcactaaagccagatctaggaataacttttagaagagtatctatggacaaattcacatttaacaacgtaagataaaggcttggcatatgaatttgattaaagcatatgttataaactaattatatacaccaactatgttttgccatagtattctgaaagtagtacaatggaacagatatatatcttatataatatatcttatataatatatatcatatataatatataatgtctcatttaatatatatcatatattatatattttatatattatataatggagcaataatataaagggtagtattagtataatggagcagtaatataaagggtagtattagatgttgagggtcgtaagggttctttggtgaaaagttttattgtgtcagcgaatggttggagcagtctttatgggcctacagtgttgggttcttttgcgtagttgtatataacctaaaatttttttttcagtgagtgtaaggaatggtagagacagggtctcgctatgttgcccagctgatcttgaattcctgggctcaagtgatcctcctgccttggcctcccacagtgctgggattacaggtgtgagccactgcacctgccccaaatagctttttaaaaagctgaaatgggaggaagctttgcctttagtcatctaatacctcaaaagggaagtgtagaaaagatctaatataattttttttttgttttgagacggagtcttgctctgtcgcccaggctggagtgcagtggccaatcttggctcactgcaacctccaactcccgggttcacaccattctcctgcctcagcctcccgagtagctgggactacaggcacccgccatcacgcctggctaattatgttttaacctcccgttgtaaagtttgtaaatggttttcagagaatgtctgagaaataatagatcaaatggtttgcactaacctcagttgcggaatatattataaaatcacaagaaagcagattgtttaccagtgctcaaatgaagacaattaagaatacactgctggcgatcagctcaagaggtaaaggtagaagaaaaaatgaggtagactgggcatgtttaaggcaaaggggaatataaaatctgtaaaattcactaggctgatctatgtatgacggtagttttagtgtttccttggtttagccctgtaaatacaccacttagaaataatcatacttgggaactattttatgtctaggtgcataccagatgctaggtattagatttgcgggggtatcgcctgcccccagaaagttctaccttgaccaagactgttgtaagcctacacacttagtgacgtttagcttagtaaactggacagcgcctcataccctttattaaaagtggtagaaacttcatggctcatcatcggtgtcagcaaaactgatgtgtttagatgattaaagtcaaatgactgaaagtgttttcctgcctttgtaggtgttcataatgtgacagccctgagcaacctcataacgtggcagaaggtggattatgacttcagctaccatcagatggaattcccctgcaatattaacgttttcattacttcggaggggaggtcactcctcccggtatgatgagtcatttttaaatggagggaggttgacattggaaaaatacctacatttttgctgtttcttggtaccgcttattaataagttacatttgttgtaaaaaaaaaaaaaaaaaaaaaaaaaaaaaaaaaaaaactgtgactgctgatcattaagggaattgagtattttgcactgccatggatgaaaaccttacatctaccaagctcaggtatcagcaagtcatgagaccagcaaggctgttggcagcagaaacacccacatctgagcatagcgagattgcctgattttaacatccagacttctgttcttgctacctttgacccattgttttctgctaatcttatgtgaaaaatatttcagagttcttttaaaatgtccttggtcacttggtagttattttcatgctttgtggtgaaatgctctggtatgtcttcagagtggctggtaaagagagcttttaattctgtggatgatgggaaatgctcccagttgtcaaatggtgtgtagtctctgaataatagtattcacctgcgattgatgagaaaccgcctttgactaagaatgaaatggctcaaggatatgttttctgtgtgcaagtattgatagacctttttaattagctgctttttagaggttggctacatttttgtgtgcttactgataccattgaggaaacataagtaaccaagaaaaagctttcataattatttctgaggtagttataaagcatgtaaattaatattaaaaatagatgctcactggctgcggtggctcacgcctgtaatcctagcactttgggaggccaaggcaggtggattgcgtgagcccagaactttgaggccagcctggacaacatgacgaaacttgtctctacaaaaaatccaaaattagtcaggcatggtggcgtgcacctgtggtcccactactgaggaggctgaggtgggaggatcacttgagcctgggaagcaggttgcagtgagctgcaatcacaccactgcactccagcctgggtgacaggacaaaaccctgtctcacacacagaaaaaaaaacattattccctccccctaaataataagtggtattttctaattcccataggggctgacagagatgatgcatctttctttaaaaatgtagattaatttaggaactcagaaaatacagtgtactccttctcttttcaggcagactgccagattcacttacagccccagctaattccaccaaacatggaggagtacatgaacagccttctctcagcggtgctgccttccgtgctgaacaaattccgcatttatctaactcttttgagattcttggaatatagcatatctgatgaaataaccaaggtatgtctaggttaaaataaaggatttccctgtgttgaattgcagtatgcaaccaatttacatttaccataattactgataaggtaattttgttatttgttttctgtcatgtctttttttattcctctgttactccattattgtctttttgtttgaaataggtattttccagtgtcccattttaatcccttgaagtttcttaaagttattttcttagtagttgtctttgggggataaacttaacatgttagtataatcatctattagggattaatgccagtttgtttagttatttttaatttaaaaaaaatttgtgtggctaatgccattttaattatattatacaaagactttgcccctttataattccgttccttctcctctcccttgtgctcctgtcatacaattacctctcagtacattgtatgtccatcaacacatttagaattactgcttttgcagttgtcttttagagaaaaaagttagaaatggaaaagacttctgtactattttttctatttgcctatgcaatcacttttaccagcaccctttatttcctcatgtgggttcatgttactgtctagtatcttttcatttcagcctgaagaactgtctttagtgtttcttgcatggcaggtctacttgtgcaaattcttttttttttttttttttttttttgagacagggtctcgctgtgtcatccaggctagagtgcagtgttgtgatcatggctcactgcagcctcaacccccccaggttcaagcgatcctcccacttcagcctcctgagtagttgggaccacaggcatgtgccactgtgcccagctaattctttgttttttgggtttttttgttttgtttgggtgtgtgtgtgtgtttgtgtgtgtgcagataggggatctctttatgttgcccaggctagtctcgaactcctgggttcaagtgatcctctctccttagcctcccgaaattctggaattagaggtgtgagctacctcgcccagccctcttttaagtttttgtttatctgggaatgtcttaatttctccttaaggctagttttgctggatgtagaattcttggtttatagtctttgtctcatcatttcgaatatgtcctcccaccactttctggcctctggtttctactgagaagccaactagtttctgataaggatcctttgtacacactgagtcatttttctgtcactgctttcaagattttgtggcttttgacagtttcgattatgatgtgtctatgtgtggatctctgagtttatcctacatggagtttgttgagcttcttggaggtgcagaataattcatattttggggaagttttcaacaagtttgggaaggttttggccatgtttctttctgcctcatttctctctgctctccttctgacactaccactgtgtatctgatgttgcatttaatggtatcccacaggtcttcaaggctctgttcattttccctcattcttctttttttgttctgtttcttagactaatctcagtgaacttatcttcaaatttagtgattttcttctgcctgatcaaatctgagcacctctagagaatttttactatatttttcaactccagaatttttatttccttcttctaaaaaattatttctctctttttattgatactctctatttggtgattctcatattttcctgaagttctttttatgtggtttcctttatttctttgaatgtttaaaatagccaatttagagtctttttgtctaatgtttgagtttcctctgggacagttttctactgactcccttatccccaaagtgtgagccataccttctggtttctttgtacttttttgttgaaaaccagacattttatttggtcagtggggtctcactgtatcacccaggctggaatagtaagtagcacagccacagctcactgcagccttaaactgctgggctcaagtgatcctcttgcctcagtagctgggaccataggtgtgcaccaccatgcccaactaaagttttgtttttttgttttttcttttctttttttttctttctttttttttttgtagtgatgaggtcttgctttattgcctaggctggtcaactcctggcttcaagtagtcctcccaccttggcctcccaatgtgttgggattacaggtgtaagccaccacatctagccacaaccagacattttaaattatataatatggcaactctgctttggaagttactctggaaattaaacctccctagggtttattgttgttgctgtttgttactgttggtaggttgtttagtaacttttttgactaattctataaagtctgtatctttgtcacatgtgggcactgaagtctctgctctgttagttttgtggttaatgattggaaagaaatttccttaaatgctgggtagtagtctcccagtctacgggtgaataataatcataaataaaaataaaagttggggcaagccctcagttcaacacttagccatgcaatttacaagccttagccttcatttcctgctcgcacagagcctccaggtcatgcagaggtgggagctatggtctctgagcatgtctgcagccttctgagttcctaggagttacatacttaaggttttcagagccctctacagacatgtcatttcccagctagcttttccattgaagggtttgggttagtctgtctgccgcagctgttacccagtgtctcaggtagctaaggtgattggtaatttcttccgattgtttttgataaatgccctggggaaagaggtggttcatagtagacaggcttccagtcaggttaaataaagacaaccttgcaaatgggtccttccagggagccaccagacaggtggtcagatgacagttctccgggaatggcacttggaaggagccctagccctgttctctctccggtggctgccaggctgttgatttttgaagctactaattatcgcctggaggggaaggggttggaatttaggagtaggacatgttaaaatgctgccaggctcaacattcttaccaataatcacctggttttcttgcataaatgctctctggattgctgcaagtatggttttatttctagtttttaaaaagctgattttgatcagtgttaacagtagagacagttttctgcggtcccttctctgccattttcactaacatcactcttcctttgtggaaaagcattgtttcctatgccagttgctgatttatatgtttgcttgaccttaaatgaatctgagtttcattattttattttcatcagcagcattatgtatgtatatgctttggtactttcacccatattgcctcctttgtctaagaggctgacatgcaccttactacatcagtcaaggaaccatgttaattttcttttccttacaaaaatgcacatcatttacatttactcttttgataaaggcagttgaagatgactttgtggaaatgcggaagaacgaccctcagagcatcactgctgatgatcttcaccagctgctcgtggtggctcggtaagtggcgcacgtccattattgctgtttcggtaagcttgtgtatatgtcttctgagttattcagcagtaactgaggcagaattctaaaaacggaaatgaacttttccttttaaaaacgctgtatgaaagggctcattgagggggaatcgagtttggctggtgatctcttcagtggaacaggcatgctgcttgttctctaagcttcaaagagtgagccactttccaattctgactcttcaacgatttctttttagaagcctaacttggctgttgacttgtgtgtaactaccatacggtcttgtctcctaacgtgctctgtgttttcacaaagtattcctaggtcttaaaaaaaatttaaaacttactatcccagctctagacttaaatttgtttctgtgtttcaaaccaggtgtctgtctctcagtgctggtcagacaacgctgtcaagagaacgatggctgagagcaaagcagctagagtctttaagaagaacgaggcttcagcagcaaaaatgtgtgaatggaaatgaactttaaagatgtaatacctatgaagagtaatgggcaaactgtagccacataattgtaaaattcagatattcatttataccacattgttttataggtaatttctatcacaaaccagtgacatttcctgaaatcaagcctggtaacacctgatgtttatatgatattcagtaaggacttttaccttactgatttcatggagcttttgaagtttgttttataataattatataaattagtaatgatgtaaaaaaagtatttgatattaaaagtttaatattgataatgttgctgattgtaccatttccttagcttcagctgagtcataggccagactgttgaaatgctgaaatgaagaaggttgttgcagtttcaaagtcagaggaatcgtgcttcggatttcttatgttttctagttctctgtttttccagttcacagtgggttggggtgcattcagtagtccatctttggggaacggaggcgtacttgccattgattcacatgactacatgaaattctgtactgtcatttcccagatgtttggccacagaaactttttcccacttaacatttgttaacagcctgcaaaactaaacttgtacatggcagtggttcccagacttttgtattttatggaccggtagtaatatttccaaaaatctggggtactataaggttgccaatttaccttgccaagtaatccgaataaatcactgtattatcaccatttttttcataaaaggaaaggacaatctatctctgaataagaggagtcctttaaacggaatgaatgtggcttttgggggcaaaagaaaccaagacactacattgtctttattttctcctatcccagtgcatttgagaaccatgcataagggaatgctgtgctacaaagctgtgcccaaatatgaaaacaaaataggaaacttaaaaagcaataccccctttagaaagtttttattttcttaaatgtcattgagttgctttgattctattggatttttggcattttttatgggatcatcagttggttccaagtatgttagatcagctaacatctgctactccagtaacagcctcgtacaactgcaggtaggttttctccagaccaattagttttaatagagcaaactaacaacagactgtagtagcatggttatggcaaccagaatcttcagaaaggttaggacattactttttaagctgtcagtggtatcaaataacttacctagttggaggcagataaaggatcccttacgttttttcctataaggcctaaattgaaattgttaaccaaggaaacagggtcagccttgaaaaatcaaggaattcattgtacctaataactgaagtaaaaataactagttgttcaacttttcctaaactcaaatctatttttataaacaaatgtaaataatgtttatattagagttgaactggttttcatttttataactggtagactagaccttccttaaacttttagaaataaaatgaaggcttcactggatttgtgaggataaaatacattttctttaattgtcctagagcaaagtacattagtcaccatgtgttttttgtgccaatgtaaattgtaatttaccaaagaaaaatacatacattgcttggtcttgcagaaaagttcccttgaaagaacctttccaataaataaaacgtcccaaattagcagtaccttgggctgtttttcatgagtaagaagattcaccatcccatgtgatctgtgtggaaaaagaccatgtcctcttggtggaagacatgagagagctgaactgaagtggaggaggtggtgcaagagggaccttcctgctcaaggcccgcccaggcagcggaatggagtgcagtgcttggctgcagaaaccctttgtccctcacctatatatacacggacagtcaagtttgttgctctaacgtaaggcacagcgttaatcctgtatggccaggaaactgagtagactcctgtgtaaccctgtttggaactttgccttcttaaaatgatttttc

SEQ ID NO: 12 - DNA, 44033 bp, Homo sapiens
atgcagaggatctcctccctcatccatctctctctcttctgggcaggtaaggcagaccccagaacttgggccaagcaagactcagcagcaaagaaacatcaaggctcacaggaccttgtactcatggactgtgctccttactcaatgacctcagcccccagccctcactgagcccctctcttgtgtcttttctctcaggagtcatgtcagccattgagttggtgcctgaacaccaaacagtgcctgtgtcaataggggtccctgccaccctcaggtgctccatgaaaggagaagcgatcggtaactactatatcaactggtacaggaagacccaaggtaacacaatgactttcatataccgagaaaaggacatctatggccctggtttcaaagacaatttccaaggtgacattgatattgcaaagaacctggctgtacttaagatacttgcaccatcagagagagatgaagggtcttactactgtgcctgtgacacccaccctgctgcagctctacttctgagcagctcaaaaaccactgaccaggcgcggtggctcacacctgtaatcccagcactttgggaggccgaggtgggtggatcacgaggtcaggagatcgagaccatcctggctaatacggtgaaaccccgtccctactaaaaatacaaaaaaaaaaaattagctggtcgtggtggcgggcacctgcagtccgagctactcaggaggctgaggcaggagaatagcgtgaacctgggaggcggagcttgcagtgagccgaggtcatgccactgcactccagcctgggagacagagcaagagtccatctcaaaaaaaaaaaaaaaagaacattgccatccatgtagagcagcaattccaacaagatcgtgattttctcttgaataaataatttaggaaatagggaccagagaaagctagtgtttctacctttctttcaggctcagccactcagcttgcccgtgccctcccatggtgctcagataggcagcccccagtgggacagaagagaggagagatggagccaaaggaatgaactgtagcatctactgtgacagttttcttggaggctcataaaaggtatgaccacagagccacagtgcttagagtatagcatagattaaggaggcaccttacaatttacaactatgggtgacatccagtttttccccagccacatgcctctgaatttacatgttctagaggaaaaggactggcagtggggggaggctcctctccctccttcagatcaaatatgtacactacctgtcattttgcccaacatggaaggaaaggctacatctctagcatctctagcatgctctgttgttttgatgattactgactggatattttgttttgctttgttttgttttcttcatgagacggggtcttgctgtgtcccccaggctagagtgcagtggcgtgatcatagctcactgcagcctcacactcctgggcccaagctggatatggtgttttgctctccctttcttctctatctctttacttccacatgtgctagaaacaaaacgttgaaaaattgcttccactggcacttccttatccttctttggacagctcaatttaacactgcacttttatcttgaacaatgtgtttttccagatttagatgattgacggggctctctactccaaggctgaacctgtggcagaaatcagccttccttctgtcctcatctagaaaatctaccacttaccttgttaaataacctcataagaacttgtggtgatagacatggtcagtgacttgattgcggtgatagtttcacagatgtacaggcatatcaaactcatcagattagacactctaaatgtgtacagtttatttcacatcaagtatacctcaatacacttgtaaaaatatttgtttaaacccaaaatggattttttaggcttctttggactacttcaggcaacgtctacacaaaatgttcttcaacaaacccctctagtcaaatatcctctagtcaaatatcttccacagaagtacaaagaggctgacagggcttgccacaccttatttggtttcagtcagggcttttcactgttttgccaagtgtcttcccaatcctctctcctctcatgattctgcctgacctttcatatatataatacatgttatatatatatgttataatgtgtcgttgttccatgcattttagtcatgactgcccccatgagctcttatcatttatctccccaaatagctatattctaaaccttcagaaaatctctcttctctactcttcatcccaaactcactcactttgacctgatgcatgatcccaacataggcctggaacctgccttctacctttctgccccaccccattgggcaacttctttggttgaacggtctgcaaggccctggatactggctctgcccttggacaaaatcgggttcccaaatccccatccagatacagcactctgagctccacgatcttggaaggggtttggacccagccttccccagatgtatttaaacagagggcctgtcatgattcatcaagcccactgcctgccactcagatctaattctccttctttgaacaaatgataggcaagaaggtggagtgcatctccaacatggagaggatacaattattctcctagtttgaaatcatgatttggaaaaagaatgacatctggaaaactggttatgcagatgtcaaagttgtggagccatggttttataacgcctgcaagatggattcctagtaagaccccaagtgactccctctaacagagactgggaagagtgtctctaaggagaaggaggggaaaaaatatctggacaaatccataagactgtatgtcttccgtattaataactaatatctgttgagtgcttactatgtgccaggcagcattctaagcacttaacgtgtgttatatgattaatcttcacaacaaccttagtatttactttctattcttgtcctcattttacaaatgagaaccccaaggcacagaaaacctaaaatacttgcccaaagtagcatagctagtaagggagggtgacagatttcagactcttgatgctgcaccagaggacacagcatgtaatttggggagatgggggacccatagagaaagccaccttcaggatgtgtcagaaccaagggacaacaggggctgtgccctcaccaccaaacctgttccaattgatactcccgtgaccatctgtcaaaaaactgggacaacagaacaatggtcccaaatgacctctcaagtgttttctaactgagattttgtgatcctgacacaagcttcacactgtcttctaaaatcatctgcatctcttcatctgtgaaatggggataataagagttctaccttcactgtgttataaaatatataattatagaaagtaaataaattgcatagcttatagtagctatttaataaatgttacctattataagaaaaagcaaactgcaaggaagaataattgagaagaaagtgaactaaattactgagcaccaacgaaatgcagccactttacaggtatggactcacttatcctatgacaactcagtgaggtcattatcatcctttctgttttgcaagtgaggatactgagactcagacaggctggacagcttgcttacagaagcagagccaggatccggatctgacttgaagcctgattgtcctggctgggatactgggctgggagctgcggaatgtcctaaagaaataccttacctatagcaacatctcatgtaaaggatggctgggaacaggtatgtgaagtctggtcatctttgctcatgcaaagattgctcttgactccttggccagtttccagaagaagggatagtaggaggtcttcaactccttccccctgcctcctctcccctgctttaaaacaccaattgtaatttcagcttccaggttgttctcccgagatggctcactcccctgactgaaggaagacagctactccccagcccactgccactcacactcctgagcaccacccctaggtcagcagcttttctcccagggtacaccatgagaaacatgagagactggcccacatattccctccttctgatgcttgtcaaaggtagtctcttgttggactcccttagatcctcggggtgctcatggattcactgccttttcctctccttttcaggggcttgcctggagcgaaaaccataggggtccaaggccggcataatgagagctagaaaaattccctgggtttctgtcaggtccatagagttggtgactttaccacccacatatatctttgctgtcaagcaaagtgtgcaagtttgtctcttccgttgtcatcgacttatcacttatacagaggcagcaatggggcttgagatctgacaaccacaattctctgcattcaaaagtgagcacacgggtaccagaaaacactgcggtggatgaaggtgcaggagccaccgtgtaaagaatagaaattaatttctaactaaatgtctctgctttagttagggtcttagtccactgcagtatcttaaacaatacatattcaatgataaattttccataatgacaaggtgaacaaactcagaatcaaagctcctttcctactcttcaattcaacacattaccctaaaatattaattgaaatgataggattatacagctttttttttttgtcagagcactttattcattctttcagtaaataccatctctcatatctgcttaatttttctccacagcatttatcactatttggcatgctacatattttacttgtttatattttgttgtctggctctccactggaatacaaggtccttgatggcagagatgagtttttgtctgttttgttcactgctttaactccagcacttagaataactttggcccataacagacactcaataaatgtattaaatgaatgagggaatgaaatacatatgagtgagtgctacgtaccctgcactgagctggatgccagggacacagtggtgcacaaggctggtgcggactctgccttctgagatgttctccccaagcctcatctacccactaaaaaaatgctactgaccgtaacaagattttctgaagagttgattatagagtactctggaacaccaaataacttactcttggagagcagacatcgaggctcctaagtgcattggatgttagcaggggcaaaatgaagaaaatagtagctttctcttttctccaccttttctctcttttgagtcccaagggccccagccctgagtctgaggctgtcaaagaaaaagcgaaacacttctgttttatttcacaaaggaatttcgcaacgcttctctccaaacagactggctggggcatgctatttcacaatgaaaagccacgataacacagtttcctaaacaaaggggcgattcctaactccctctcactttatcaccactgccaccaaatgattttggtattcttcaagaatacagaatccactgggtctttttgggctttttagcaatttacacatccacaaacacataggtttatgagcggtaacagcgtacattccagtgcatgaaacactgcagggattctctgaaggcgtgccctggatgctgcaaggctccaaggcaacagtcagccagtggaacagtgtgccacccagcatgctcgacttgatagaaaaaagacccagtgacagggcaaaggaagtcaagccaacatgcaattgcttgtattaatttaaataaagccaggttctcaaactccatgtttaaataagaaatctaacagtcataagttttctttttacctgcatgcatatgggagaatagggaaagtttaaattatctttctggcttaaggacaaaattgcatgagtatttataactttcagaaaaagaaatgtcagtctaaatatattactagggcaacaaattattaagaaaaaaaacccaaagtacagtcttttggaaattaaagttgctttcatagaatatagcagcattcactcagtaacaattcattaagtacctcgtatgtgccagacgcttttctagacacaatggaagcacagctctcagaatctcaggagcttatatttcagtggaaataaacacaaaataaaataagtaaaatatatgtcagatggagataattgccatggagaggagtaaaacaggcggggagagagagagtgttgtcagcaggcttgcagaaattacaattttaaatcaggttgtcaagaagggatacaataagaaggtgacatttcagcaaaggcctgcgtgtaggcagggagcccagtatttggagtgtggatgtttgctggactccctctgttagaaataacattttcatgcacattcttaagacataatcataccagcttttctgtaggttagggagataaggagtcattttttctttcttatcttgctaagagctctttcacaagtagttcacactttcatttttcaaaatcaagcgatgaaatgccattaattagcacaaagtgtgttggggagtggacgcgagggtttggcaaggaagcagtcctgaaaagatcaaaacttacaacatgaacaggaagatgacagcactgattattgacaaacggaaaatggggcatggcattttgagccctttgccttgagtctctccctagtcacgtgaccacattctgtggactggtgagtgtttcttccccaaccacagggataagaatacaaagtgagtgatgcatttctctcactggtccccagatgactccactctagcagccccggaaaagaacctgcagcctcatctatacctgcaggttgatgtgcctcccaaaaactgtctcactcagttgtggagctgaaatcaatcatgtgttcacctcagtggggttcttggtttttcttttctggcttctccaaaaagccaatcatagagaaacctgaggactgtggagccactatggagaaggctggagtgcctttaccatccctagctcagctttagggattcaccctccaggacctctgagtgtgctgggatcacacggcctaaggtaggccctagagtcagtttctgtctttacctgccacctgacaggagtgagaagttttacttagaggcagtgagaagggaagtcagcagccccagggacagtacaaaggagacacagcctgagtgtgtgttgtcagaagctctgtcacagcgaaggcctcctcgggcataaagacctcactgtgtttgcataacacctgtgttataatcgtgagtgatcaataaaggattaactgcctcagtcatctaaggaaatgaagaagggttttatgcaccaagttcataaataaggacacagaaaaaaaccacgaaggccagtgtagctgcctctgtacgttgaaattagagaactggtacaataacaataacccacctctgtagtaagaatcaatgtaaaatctttgagttcatagctagtccatttctcagcatcaaaaccatcattttgctttctgtatggaggacgtccacccccacatatgcacactcagagtgtcagagcaatgagaaaccaattaccatcaggctccacctctttggttgaagacatagaaactgatgaatgaagaaattaagtgacttttccaacatcacacatatagtgcagacaggtaaagtgatatactgtacttctgtctctttcctccaatatcctagaagtcaagggctaagaaaagacagaaagggtaaaccatgtgatcatgccaaagtgaaagaaaaatggcagcggagtgttctccacattccagacaactacctcctgccaccttctaggtggcaatgcagtccaggtaggtaaagcgatatacaaaaataaatagccttaatcattcacaaaaatattaatgtgtgtcaaatttaaaaacaatgaattgcaaattgcccctaactttggcaagatcctttcacctaccttaaaatggacaagtttacaaatttgggctataaactgcatataagtttttgttggttttttttcttccttgagacggagtatcactcttgttgcccaggctggagtgcaatggcacaatctcagctcactgcaacctctgcctcccaggttcaagtgattctcctgcctcagcctcccgagtagctgggattacaggcaggcacaaccacgctcagctattttttgtatttttagtagagacgaggtttcaccacgttggccaggctggtctcgaactcctgacctcaggtgatccacctgccttggccttccaaagtgctacgattacagatgtgagccaccatgcccggacacatatgagtttttataagtaagttcttttagtagtgaaaaaagcataggctctggaatcagagaaaaatagaatcacaacccctcacttcatagttctgtgaccttgaaaaatgttgctttaacttttctaaccctctattccctcatccacaaaataaggataataattgcatagagttatcataatgatcaaattaaataattgcaagtaagtacctgagtgactacaaagcagaggtgctcaataatactaactccattcctttcagcacccgatggtctgcagtagagcggttcaccctctactccagacagaaggagacagaaaagacagaaaagctagaatgggagagaacatggccaatgaccaccagcatttttccaaaccaagaaatctaaagtgcctatcagcacattttttataaaaatacctcctcaggaatgttcttcccacacaacctctctaaatcctttccctgcactaatgatagtgaaggtcccaaaggcaagaccatcactgggagggtctagctccccaacaagagatgatgccctcattgcccttcatttgcagagatgaaggtgacacaggtcaatgtcagcttcaccaatagtaacagggagagtaattttttttttttgagaccgggtctcgctctattgcccaggtcggagtgcagaggcatgaccatggctcattgcagcctcaacctcccgggctgaagtgatcctctcgcctcagcctcctaagtagctgggactacaggtgtgcagcaccatgcctgggtcattttttaattttttgtagagacaaggtcttcctatattactcaggctggtcttaaattcttgagctcaagtgatgcccctgcctcggccccccagagtgccaggattacaggcatgagacctcacgccctgcatgaatgaattttttacatcaaaccttctccaacaaacttggttcagatgtctgagacaagagttgcacaaaggagtctcagtcttcagaaagttcatccttacccagctttatggatgctctaggacacatttaattcttgcatccatttaggaacagagatcttctcccatccttaaaagggaaactataatattaattactgacctgtgatgagtcagctgtccatcctcatttggcccatgctgtctacatgaagttagttttcactgtagtgcttggccaagaaaaaccaagtttttctaaatgaattccaaggataaatagcctaattcctgttctttggcttcttccactaaagaattatagggacctgatctagggaaactggggggaaaagccagggaatgagagccactgtcttgccagaaatgcatgttctgatgaggaaagatagttcaggatatctgcgccaaatcacacattggaaagaagctttctgagatctgaggaaacttccacctgctaaaaagagctagcagtctgctggaaagaaaaaaattcattcaggtgtcagaactcttactcttcactttgtgtgtgactgtagacaagtcagttaacctctttgcacctcagattctcatctgtacagtaaagagttcacattagattgtctctaagtttccttcagcactaacaagccgtgggacataggagaacaaatttgaaagattcctgagatacaggagtatggattcctgcagctgattcctttatgtgacccagtaaggataaaatcgaaaaaaggaactaaacgaaatacactcttgattaatcaaaggggattgaaagtcgtggctaacctcacacctaccttgcatcacctccagctcacctcccttgagacactcctcctcttctttaatgcctcatcatgattctcaaaaactgtgatcactcaaggttgaagcttttaatctcccatgtataaaaggatatgcaaatagagttcagtttcctgttgagtctctgccaaggtcttagcctggcagttctgggaaaagagccaaagacctcatatttcttggctgttaacattctcccatctgtgctcaagtcagcagcctaggcttcaggctgtggtttgtctttagtcttacactttcccaagttttctgaaggaaccctttagaatgttcctgcaagaaagtaagatacaagtggctcccaagaaaccagacagaggattatctggttatatttggaggcagtaagaaaaagaccaggaagtctatattcctatagtatatagccacagaatccaatcttgcaagctacttgaaatgctgatattaattaagtcttaggcagggctttcaataagtcatctgtgtctccaatatgggatgtcccacatcatgcatatgcacagtgaaaaaaagcgaggtccttgggtacagtacagcattcaaaaattaaagatctgaaaaacacaagacatctcagtgtgcttccgggctggaggctctgctaaacaacagaagcagagaccggactaattgtcccccatgtctctttgactgaactcacacaaaatagaatctaccatttttactcagtgcggggtacccagactcaagtttactgcaatgttgttaccaatattctaatggaaaattatatattcagagctatgttaaatttgaccatttattaaacatgaaatttctactttttctgtaagtgccttgtcttacttgtatttcccggtatttcccttctaaagctaactccccaaagggctttcctgtatgttctcacttccattacaaagtcaatgtacaagttaatttttttaatttctttagaaacctttataaagagatttcctccttcatttctctgttatcccaggcagctgtcaggagcaaagagctcaagcctgcactgccttggaacaggacatcagcaaaagacactctcaatctactcagaaggctgaggtgggaggattgcttgagccaggggttcaagaccagcctggacaactaagtgaggctcagtctcaaaaaaaaaaaaaaaagatctcaatattattgttccatacccagtcattcacttggtgttttctgcagcatttatttataaatatctcagtctgttcttaatccttgagcctatattttttaaaatcatactttgatatctactcagagtattgattctcttcaaatttcccacctcttagttctcctcccactctctcccaccctgagccttacacctccaacaatgatcattctaagaccatttatatctcaataggaaagtgatgtaaaacgggtctccttactctgttttggagggtttttttgttgttgctgttgcttgcttctctgtcccaccccaaactcatgtgtgtctgaaatttagcaccaccttgcgacgtttgtgagcatttttctcagagcagcattttgagactgagcctgaactccactgatgttatgacccttaaaagtgtctggctccaaaagactaaggagttcctgcgtaaatccaggtccagctacttcatcactgtgacttgttattggaaaaggttgagctatcaacatattgctcctgtaaaggctcagaactgaatcttagattcttcaggatatttgagtcctctgaggctcctgggtaaagactccaatgtagcagttctgtggactataaatgggagatatccagatcatacaccttcaatggaagaaaaagcactgtcaccttagacgactccaactctgtagtctacttttgtcttcctaatatcatacctcattctccagtgggtttatggcaagcctcatctactcagaagtaaccaagtacaagccaacacactcttgtgttagtgtggaggcccaaagtggcataagtgaatgtgactccagatgaaaaccttcccctctccaacacaaagatgccaaagactatgtataaagcaagtcttaaatcactctatatttccatttgaatatatttccccagttcctgtgcattgcttctgcatacacagaattcaatgataaaaattgagactgtctcctagatacagtaattaactcagctatcaatgccaattgactgtgtagaggggagacaattttgtaccaagatttactaacctctattttaatggaaaaacaatggaaaagctttcttcctactatgactctctctggataaattgcttgccaggaagcgttaggataattctgccatgactctttgtcttccacacccaaagacatttggtctccatcacatatggaggaaggatctccttgttcagcagtatttacaccatcaccctgacacccgcagtcagatctaactatacagcttggctaataaacctggagaagctcatattctaagaaaaaagtggagagtggtgggacagatggggcctgagtgctgggaaactgcccgtgcccactgctgacttggtcttctcaccagctgcttgatctaacagatgcatcttccttatgaggcaccagagaaccagaatgtccacatcctgtggtcccctgtacccttaacaccccacatttgagttcctttccaattcagaaaacaaaacctgcaggctttgagccaatttacaacagatgtgggtcacaacaaccaactacccaggaagcctccaccagaacgcagcgtgagaatcagcttcttagatattcccatacgtgtgatcccatcaatcatttaacaactgtcaaagagaaagactaggagactttctcccgagcatctccagggatttaattcactatgttggaaattaagagattactactaagccataagaaggctaagacagagttaaaagaattattggaaggttggcattacaactttacgtgtacactaggaaaatctgcagctctacctgtagctttgacataatgccttcctataccctgtccttgcccaactgtgactcccacatcatggtcataccctggataggcccctctctgcatgtagagcaatgtgaatggggattctgcttatcaggatatcatcactagtctgtgccaggccttgcaagaatgtccttgtactgcaactatttgtaccagatggtaccctggccacccctaagtgtgcagactttttaactttttcccccaagaaagtggtccctgatgtgcactgcctactgagtaaggctaagaaagataggaaggaagaggacaaagtgcaaggagagaaacatttttgcaaggagaaaaataatgatgtggatgcagaatatttatcatgtgaattcatattaacctgacttcctcagaaaatgtcaccgttagtattagaatgtgtatttccttcggagctctgaaagaaaatatgagaattcaaggggtgctagtgcagaatacacacacacacacacacacacacacacacacacacactgtgcttcactgtggctggaatgatgcagagtcttggcaatagttcgggaagctgctagctgtccgcccattgtaaacagtgaagtaggtcatctgtggctccccatcctcatctgtctgggccattttcttgggccctcctccacatcccattcctcatatgttctcattctatttccatcaaacctcaatctcaagaaatgacctgaaatcaattcgtactaatgtttgagtcatgaaaacagaggaaggctttagcttctctgagattggcagggagggtcgctagtgagcattgtattttcataaagataatagccataagctaaacactgcagcaaccacagcagaattttccaagcctgaggaacactgcccaaaatgaaagacagaggtttgttctctctttgtttggaggttcagtgtggatcatacacagagagtctggagcctcccacagtggacacttcttttcctctgtccagggagaagtccagctggagcagacaaccagagagaacattagcctgaccatggggaaaggcattgcagcagaattaggcccaatagaggaaaaaagatgcctggaaagaaatttcatttcaatagcaggaatagctttgtaagagctgatagccattcaacagtgaaacaagcatccttgtcagtggatgagttcggtggatgactacactgggaaggttgtctacattggttgggagctaaactcagtgagctctttccctcctagaattcattatatactgtatgtatatgattatatatactctgtgtatgtaatcgtgtattacatatactccatatatgtatattacatatacatatattacatatactctgtatatgtaatcatactccatatacacatttgtatccattacatattcaattttccatgctattggatatttttcctattcaataattttaataagctatgttaatattgtatctagagctacattatagtttactcaatcagttctcttcatggttgagcatttaggcaacttctaaatttttcctactatgaaaattattatgatgaacacacctgtacttacaactttttcattatttaaagtcatcatatatgtatatgatgatttggatccacttccacatcccattccttatatgccctcattctatttccatcacaactcaatctcaagaatatttcagtatgtgacctgaaatcaatgcattctaaagtttaagtaatgaaaacggaggaagactttagcttttctgaggttggcagggagggtcacaggtgagcattgtattttaatagcaataatagccataagctaaacactgcagcaaccacagcagatatacaaatggtatatatacaaatatacaattatatttgtataaatatatataaacatataataaagtaagctcctattttcttaattagaagattcaaagttaagaattttgtccaacttgaatatatgaaactttagggttatagagaaattagccaattctactttagatgttttaatgtattaatacagttaaacacacatattttaaaattacatattatataaaataatatatcaattttgaatactgctatttccttttaataattcataaaataactttaaattcttcacaggcatttcaaatcaatgtatttgttgccactagagccacttttttatcctcaaatatttttccagagtatatgaaactcactttgctaaattgaaaattaagaggcacattagatttagaaacataattttaaattgtttcaatgatggcacattattaatacctactttgagacacaatacatactcacataatattagaatcattgttttgccatttatcctgtaagtgaatattcatgatctccacaacaaaacatttactttgatagatttgtttaaacaatatcaaacacttgcagtcttgaaggcactggaagacccaaaaaatagttactacgtttctgttaaactacttagtcatctttttaactaattctatcagctgactgccataagcatccatgagctagcattgattgagatcattccaatgtgtcctcactaaactgtacttaactgttcaaagccaaataattaagtgaaagtatggtaatactgtttttcataattattgtaaggaatcaaatataagggatttcttcttctctgaggatcatgaaccttactccatgttcaaatagatatagtattttttcacagtaaattccccaaagtggaaatagtcactcaaacgaatacttttactcttttgacattaaccaaatggcttccaataaaaatcaaacaatttatatttttaccaacatcttgcccacattgggagtgtcaacattttgagcaaaagctttaattaaatatccatccaaaaaatggtttgttaatactttacagttttattactagagggttaaaatcctttttcaagtctgataatcaatgattaactttcttcatttgtccttcacccatttgttttttaggttgatggtgttttacttattgatttgtgtaattataataattttgtgtctgagttttacagcatttaaccacaaaaacagcattggtgaaaggagtttcaggggtattgtggatggcagcgggtggtgatggcaaagtgccaaggaaagggaaaaaggaagaagagggtttttatactgatgtgtttcattgtgccttcctaccacacaggttggagtgcattaagcctttgtccaaaaacacccagccgtgacccgctatgtatgtctcagcattgggaagagtcctctgagtgtcatgggaaaataatatatgagttttattgcccctgtgtcccaattattttctgtttactccatgttggtctacagcaatagcttcagaacataaacaaatatcaccaaaaacatcagtgatgaacaattccaaccacacatttcaatgtttactaaatatacccgtggcactgtaaaaaagaatataatggaagagtaaaggaattgggactgatcgtgactgagaacctgtatagtaggctacacactagctatatgatgaaccaagaagttgaacccaaatctaactaacttacataatcccttcctttaaagaacttaatgtccagtgcaaagcaagtgttcaaaaaagtgtttgttgtgaattgaattcatttcattggaatacagcatgcttgcaaagtcccaactttttaaaataatgtgtttctaaagaccactggtctttagaaagaccaatgaccaaagaccttagaccattggtctaaggaccatctggaagcagatccccaaggtgaaattctgacgttgaattcccaaatctaacaggtcatgtgccttgttctgatgagaaaactgtcgaataagggagtagcagtggcatgaaggttgttagtaggtagcataggccaaatggcccagtgatgtgatgaaaagtgcactcctccaaataagaccctagttactagaaagtcacaagtaggtaaacagatgccgggagggacagtttttgttggataaagtcagcagagaaaggcttttggaggagatgaatcctgagctggtgtctacagatagtgacagacttagtgcgactaggaatattatggagaataaaagaatctccctctctaactaatgccaccaagcagtcccttcaccccagagcaaaggcataacctatcttcacccaagtgaactatgtattcttgaaatatatctccttggaactaaaccatttttctgttcacttcaaatcaaccagtgttaatatcatagatctgacagcttagaaggcctgtgttctccttcactcttctcttgaccctatgtgagtttgattcaagagcatggggattagtcccttctcttgaattacaatcaccaatcagcacaccacatccagttgctctttttaagtctaggagagcaaaaacaatgcacaggtgaaggaaactatgcctaggcctcatccctaggttgtacaaagtaactgaatttatggcttcaaggacagaataaatcaaataaaatcaaagaagcccattttcagggaatagaaacaattcacagaaataacaccttgaatgaaattctcatttttagtgcagaaatggaacataacattcttagattacttgctttctaaaagtgaatattctttaggtattactttttcaacattgatgagtttacaacatttctttttgcatagcagacaaaactgtgtaggcattcacagttacagaaagaaaaaatatgactagcttcctgcttcacacaaagaaatcatgcaaaaaaaaaatttcaagccaaaagaaaaaaaaagttttaaaacattttaaagtctcatattacttgctggctgtaatgggaatgtgtaactttgtgaagatgtctgtagccatcttattctaatgatcacttatctttatcaagccattatgtccatcttgacatgatgcaatacacagggcataacattacctacacagtatttctgacataaataaataaactaaaactaatcaaacttttagttctaacaggagacaggaagctagaaaagcaaattaaaggattctacaaagaaacatctagacaaatccagcaggtgagacattccactggacaacaggttcagtcccaccaataatcaatgtcatgaaaaggcaggaaaaaagtgcagtagaggggaagcagtggaaggagaactattaaagattaaagagattttaaagatttaacaacaatgaaatgcacagtctttgaatggatccttgttttaaaaaaaaaaaaaatctgtaacagaggccaggcatggtggctcactcctgtaatcccagcactttgggaggcagagactggaggaccacttgagcccaggagtttaagaccctgtgtctgaaaaaaaaaaaaaaagaaagaaagaaagaaaaaggaaaaaataatctataaaagacatttggagcatttggaggaaaactaggaaaacttgactatgggttggctattaagttattttcgggaatttctgttaactttgttaggtggaaaatggtattgtggttgagtagaaaaatatccttttttgtaatatatactgaagtgaattgtcattttatctgtattttttttaaatactcgagcaaaacaaatagaaaatgtgacaaatgttaacaactgttaaatctaagtgatcattctatagatacttattttattaatctcttctttttggattgtttcaaaaattttataataaaatccttttttaaagtcttcattttgtgggtgggcatggtggttcactcctgtaatcccagcactttggggagccagggcaggtgattgcttgagcccaagagttctaaaccagcctgggcaacatagcaaaactctgtctctacaaaagaatacgaaaatgtcaccaggcgaagtggtgcatgcctgcagtcccagctactagagaggctgaggtgggaggatcacttgaacctgggagatcaaggctcccagtgagccatgagcatgcctctgcactccagcctggataatggagtgagaacctgtctcaaaaaaataaataataaagttttcatttttaaatggccaacaagtctacagcaaatttaaacaatgaaaatatgagatacaatatcttccttaaaaattagcatattttcttaaggaatactgctctgctcgaagaattccctagttctgtaagcgttcgaacaaattaaaatcttgtgtttatataacatatttctaagacaacaatgaattctgtcactaactatatgagtaaaatgaacaagaaaaccactaataatgatggtgcacattttagattccttttattctttttcaagacacagacataactgagatatcttaaaatcactgactttcaagatttgagataatgataataactcaagatcaagtcttccccttgtgttagaagtgggggtgggacagttccagacttccacagttgtaccaatgaaccccaatcagatgattttcaagttacttctccttcaggtgggtgggcatcagagagaagctaagagaaggttttgacaaaatccaaagtgtgtccagacccctcaaataaggtaacctgaccaagtttaatacattcttagggcctaatatggatctcagttaaaaatcctggtctcttttaattcttgtccagttgctaagtgtattatttgacccattaactctgcaagtcatgttggtccattcttcttctttacggttttgcaaaatacatcaggttacagtttcaagtatctgtcacttaaacaagtaagcatttattatttttaatgggagggctaacatattgccacagaaatatagtatgggtactgaagaaaatatacacagactctcaggtcatcactgagccttcccaccatcatcatagatccagcatctgacttccagagtaccaccaagaagaaatcagaggcagatgacatacatatccatggtccttgactctagagagtccagccaaaatgtgtgggtccatttaatcatttctacagaaatgggaggctattgctccaaatgacttctaaccactcactcatccatcactcaaagcatatgatacaattgatttaccagtcattagtaggcaggtagagagtggtgaagcagtggagagagcttggtatttacagctgctattgcaactttggtagcacaaacaacatggaattaggacagggattttcaaagtattgcccacggacttctgagcacctcaagatcttttcagggagtccatgaggtcagaatttttttcataataacagcaaaacattacttgcctttttcgttgtgttgatatttacactgatggtggaaaaacaatgatggataaaactgctggtgccttagcatgaatcaaggcgggggcatcaaatctgtattaataatcatgatattcttcactgccacatattttcaggggaaaaaagttagtttcacttaaaaatgatactgactgtattaccttgctagggctgccataacaaaataccacagactaggcaacttaaacaacagaaatttattttctcatagttctacaggatagaagtccaagatcaaagggctggcagagttggtttcttctaaggacccctcctccatctccaggcagacagcaggcttgccgctgtgccctccagaaaggatggtctttcctctttgtgtggggaacactggtgtctcttctcacagtgtgtccaaatttcctcctcttataaggacatcagtcagattgaattagggccaactttaatgacctcattttaacttaataacttctcaaaaggccctttctgcaaatatagtcacattctgaggttatgggatttagggtttcaacatgaatttggtggaaaacaattcaacccataatactgacaaagcaataacaattattaattttattaaatctcaactttcgagtacatgtctttttagtattctatgtgacaaaatgataagtacacataaagcacttctgttacattccaaattatgattgttatctaagaggaaacacttgtgtggttgtttgagttgcaagctgaactagctactttttccatgaaacacacatttttgcttgaaagaacaattgacaggcaactatggttattcagacttgtagatttgccaggcattttcttaaaaacaaatgaacagagcctgtcatattaaaataaacaacttatagttgttgctaattataaaatcttttttttttttttgacagagtctcactctgtcacccaggggggagtgcagtggtgcaatctcagatcactgcaacctccacctcccgggttcaagtgattctactgcttcagcctctcaagtagctgggattacaggtgctcgccaccacgcccagctaatttttgtacttttagtagagacagggtttcaccatgttggtcaggctggtctcgaactcctgaccttgtgatctgcccaccttggcctcccaaagtactgagattacaggcatgaggcactgcgcctggcctccaccagtactctttagcctctgtcctttgagatgaaaggcgtatatccagggagtcattgccacttcaccctgacctctagaatgaagacacataaaacagacctaaatccaactcacatcttgaagccaagtccaggtggcctgcagaccagtgagcaaaagtgatacatgtttgttgctgtaagcaattgaaattttggggttgttatagatcacaattacaacaaaaatagctgattaatacagatggtgggtcttgagaggattctaccttcatatgcttttaactctatgtctctagcaattatgaaatggcatacctaaaatttttggtggtttcctattatcctcaggacaaaacagtatagcttacttgctcccttaaatgcagttgcattgaactacttacttcctgaatgctctgtgttctttcatatttctttgcttgagatgccctttccttcttctatcccccaattggtccgtagtccctctgtattttcagggtcttagctcagttgtttgcttccctgcgaattcctaaatgactaccccagtgatctgggttaagtgctcacccttttcggaattttcatagcatccagtacttatctctattttcgcactcaaaaccctttttctttcttcttcattaggttgagacccttgagagaagtgatctgtcttgttcatccctgtataccatgtaccagcacagagcctaacccagtgagtgctcagaaagtgccttctgaacccattttaaggatgaggtatctcaggttcagggaagataagctagtaagtgacagagccatggccagatcttcccaactcccaggttctggctcagtgcctggtactaggctgccttatggaatactgccttaacatttgtttagtggtattaaaacacattggtttttaatattagcctgagttaaacatggttggtaagtttaatttgttgtgatttactccataccatatactatattctaaagctgtatagaaatgagtttcacattgtctacatatttggagtattcaagtcatgttctcttccactaagatcaattgcatctctggagaggaatcctcgaatgccacagctgggagatgtttcaaagatcatgtattcactctcctaggttttcagatgagagagtctagaaagatccagagaggtttcacaacttggccaagtcacccaatttcaaaagaacttacaagaaattgggtatctctatcccagtgcagtgatctttttggtacactaggcgaatgtcttctttggtctttcattctggcatttatggtttgagactgtttcagcctgtcagtggatacccttccctggagtggccctaggatagtctgggcaacctggtcctttctttctctgtgtagattttaatcgttatgtgagatgctcttctgcaggaatggggaagagcaggcacaaggtggatgaatcctgaagttcaactattcctggaaggagactgtgtcatgttcttttttccaggcaaactcattttcagaggaaagggacagtgttggaggctgagttgactgtggtacagttcagtcctggctgggttgaggtctcatgcttgggagcaaatatatgggatattaagccaagaaatgaaacagggattaaacaggggcatcctccaggcttagaatatttgggattgtgaactttgagctagtgttatttatctctaccccctgcttctggtattaacacacacggtttgagagttgtagacagactacggcgtgttttaaaaaggataccaggttgtttaacagacttcaaaccatgtcctgggaggaatagctaaaacatatgggagactgtagaccaaaggaagggaggtatcatagtgatcacagtcttcagatatctgtcagagaagagctggcatatcagaagacagttggattctcatgtctgcttatgcactctacctattgcagtatgttggtttggttgaaatatatgaggaaaatctggcctcacatagatatgtagtatgaaaacaaaggagtattttaatagcttgttcaaaatattgtggacatgatattctttatattgcaccataattatttgacaagaggtagtttctttgaaggttagttgcaatgtgaaatctgataccatcttagtgaacttatcatattctgttacattaaaacattggtttatcctgaaatttggatagaacgttcacccatgcatgcttcttaacccatccattagtcacttgagaaaattggttcgctgttaagcagcttccacctgttagcacacattttattattcaataccaaaatattacagtagctaacatcatcactggtctctttaagtcaggaaaaatttttaaatattggtgagctatctacttcacagtgacaaacataaatttcctaaaactctaatttttcctggaagcttagattttctaattagcaggctgggcacggtggcacatacctgtaatcccagcactttgggaggccaaggtgggcagatcacttgaggtcgggcgttcgagaccagcctgaccaacatggtgaaaccccgtctctactaaaaatacaaaaattatctgggtgtggtgggagtggctataatcccagctacttgtgaggctgaagcagtagaatcacttgaacccaggaggtagaggtcgcagtgatctgagatcgcaccactgcactccagtctgagcgacagagtgagactctgtcaaaaaaaaaaaaaaaagattttataattagcaacaacttagcttaggaggctgaggcaggagaatcatttgaacctgggagacaaaggttgcagtgagatgagatcgcaccactgcattccagcctgggcaacagggaaagactccgtctcaaaaaaaaaaaaaaaaaaaaaagagagagtgctggtggaaacccattatgtgacgtgtcttgaagcctcagcttagaactggcacaccgtcacttccactcatattctatgaatcaaaacataatgaagccccaatgtcaatagagcctgtagtaggaagccctgcaaagtcccatggcaaagaacctggaggtacacttctattacagggaggaagtgaagagttgggaagctgcattctcatcaggattcccaacttctgtttcctctaactaatcctattcacaccagtttctgatggctgcttcttgggaaagtcaccagcactagaaggagctcaatgagtctcatatgggtgagtcagaagcttatttcatcaatcagctacctcttgccatttcaaagactagtacctaaggccagctacactcaagagtccaagtgacagttctttattctcacctggttctccccatgaggccttttgctgtatgccatcccattacatcgtctgttattgaagccataacatttcttatttttctcttttcctatttgcttttttttaatcagcaaaagaatgttagactttatatagagagataacgttccttggagtttatggggcaggcatgcagctgtatgtagggtggaaagtcattacaaaggtcataggtaaaatagtcataattaaatcaaaccatggatttggataagactccagggaaagtgtgaagagtaacctttttaaattcctgctccctgttgataaatagcaacaacaacaaaattcctactcttctttcatggttaaagtttaataaggtcactttcgatgagcctatcacctatcatattgctttgttttgacagcactagaacagagatcaaaggcaaacaagaccagtgtcttgtgagccctgaggagaggttttgagaaggcaatgactgggtcaaaactctgaggtcaaacaagattaaaactgaaaatcatccgttgaatttggccagagctgctgcctctgattgctcaggttgtgccttcacaagggcatctggcagagaggagaagtggggctaaaattcaatgcgtgctctgccgccagccaaggccctgatgtggcgttgcatcttccggaaagggaaggccttttataaaccacacaaaagtgcaatctgttcgccaagcttgaacccaaggggctatctctacattcacccagcagggctgccttttctaaatcgcacaaagcaccatatgggctactggcctgaatttagcaactgggaggaggtcaatggaggggacacaattttaaatttacatgaaaaccctttgtaaactgtataacactattcaagtgtaaagcaggaagaggtgattcagaagcttagcaggtgacaggagaaattacactgaccacaagccttttctgcctaacccacagcatgtagaatctccatgagacgtttaagtacccgacaaactcctcagtgggaaaccatttgagggcagactggccagaaagcacagatgggaatggatgtgattatttctaaaagtccattctagtcacaaaccccaaggcagatctagccagtggggcagaagagccccagacagaagcacctgagccagcttggcctgacctaactgtcaggaccctttgatcttgctggagcttgacttggagaaaacatctggttctggggattctcaggggccatatagtgtgaaaccgaggggaagtttttgtaaagctctgtagcactgtgactgggggatacgcacagtgctacaaaacctacagagacctgtacaaaaactgcaggggcaaaagtgccatttccctgggatatcctcaccctgggtcccatgcctcaggagacaaacacagcaagcagcttccctccctgctttggggcctggaagggatagcaggaagttgactggaccagggagatgaccacagctgctgacctctcactcactgctgttcttccttgggtgaaactggcatttctacattttcttacagcacatttggggaatacaaaaaggcctttcttaaaaactattcttgtcttgttttcatgttgattctattgcaaaagagagttatatgagccacctcatacggaatttctaaattcaaacctctagagagatttacccaagtgctttgctttgcagtttgggaggatggatttgaagagagattgatttttttgtaggcaatcaccggccacagttgctcattctaaagctgactgctctgtaaatcacccagtgcttcatgccaccctttctcctcttgctgtgccacacgttatctgcctttaaagcagcagcactggtgtctgtaaaggccttaaccctggagtagtcatggagccaagacccacccctttgacagtgccagctttccaacacagagagctgagtatgggtctaggaagtgagagcaatgtaaaacaatagaaagcaacagttcagagcactgcatcaagtgtactgtgctggaaaggtccgccataggaaatatggtcctccatactcctcagacaacagccttccgaaagcaaacctgtccctacctgcagatgattaaccatctatgaaccggctgggtaagcaacaagtgccatctttcatggagctgagccttaaagatcctccagtcctaaagctgacgggaagaaggtaggtgggagcagcgctgaggtttttggaacgtcctcaagtgctgtgacaccgataaactcatctttggaaaaggaacccgtgtgactgtggaaccaagtaagtaactcatttatttatctgaagtttaaggttaaggcatcctccatctaaggaggcagaaataatcctgaaatgggaaatgggtgaaatagctagcatttaggaggactcctgggaagaggtgaaatatggttaatcctttccataggagaggagcagaaggtgtctgtaaaaaaagagtttggggcatatgaagggacccttctggctcagaggaaacagagaactctgcccagtccatcgaatttgggtcaggctgtagaaaccacagagtcattggcccaactccctgagcagagtcagaatggacacagaatgaagctgacttgagtccaggtggttttaccaacgtgattccaaacgttctgacctcccttatgccaaacacatcctcctggaagagctcagaactgaatccgtctcctgggcatggagggtggggcgagcgcaagtagtccctggtgttgcgatatttctctttagaagaaaataacctgtttcagacatttgtttctaattgtttgagctgcaaatgaaaactaggttactagtgagaaatatgggacattctggttcccactgagaccagattccaagcaggacaaagtgaatgtgtagtgcttccaactaagaaatgctttgaagtctccaggacacagccaggagagttccctaccactcaccagtgttcatcgtttttgcaaagagtatatggtgccagtcacttattaacagttatgcaagaatcaatgctaaggttgttgaaggattgtgctcaacacagaaggcatctttggtgtcctttcaatgacatttgaattcgaccgtgtcttgctaaaaaataaaataaaataagacagtggtctccacctggcagcagattccagttagatagtacatattaatcttaagtaagaaaatgtaataaaccaatacaaaaacccatttcgaaggtcctagggaagtctagcaataggggtcagtggtcccaaatctgcccaaccagctgttggaaaagaaacagcatgccctgccctggctgggactttggcactcagctcaggtttttcaaggtaaaagaaggctctagagagatagggtggtgatggtgggctcttctcagagaccaaatggggacaaagcagttccaggcatatgcaggcaaggaggctgaggaaggggaaggacaggcatgagcaacccaagacctcacacactgcagggagaaaaggggcaggggccctgccgtcagggagaaagacacccaaagttgtgctagtggagtcagtgcagagatgttcagacttttttaaaaaatcaacatcttagtaagattttgaaattttaactaatttgggcctttgcctttagaccttattatccttaaaattttcactaaaataagtttatccacaattccaacaaagctaaagactgattatcctaatttccctttgtttgccaagtaagggatgaattaagttcctctgtttacccatttacttggtccatatttccctaactgcggagtgcacagcacatattttcagatggagagacgttctttttatttgcatggatctatcttttaatggctatcagaatagtacaactaggctatcaaacccatgtgatttcaagtttccttttaattatattttaagttaaaaagtgaataaatttttttaaattattaagcaaattatgacagatgactatgaccaaaaaagcgggggagatgtgcttaattgaagtttgggaagtgctgaacttcatattggtgcatttcatcagcctttgaagtgaaaaagtaaggggtatccagagggggcacaacctagaatatctttgaatggcagcttctatttttaagctaccaacattggattaaagagactgcactgcaaacccagggcctttatcttctcagaagccttttgatgctttttttttccttgggagcttctttcaagttcttacttacggagctcctgggtagcacaaaactaacagaacaggtctatacaaacccacagctgtagatcccacactttagtcctctggatacagtaaacctggagagaccacttagcttcgtaaaacagaacagagaaacaggacaaaacagcatggaataaagtaatggaaacgtgtacttctatggtaacaacagcggcagtggggaaaagaggcatggtcgttgggaacatctgcgtggaagtgggccatgtgatggactttgaatgcaatctattattgtatgtcacaattatgtaactaccactttttgagtgcctaccatttattaggccactgggctaagtcctttaatgattatcacttcactcagtcctcactacgatcatgtggaattgaggtaccatgacttgcgttttatggatcaggaaactgaatcttaaaggggttcctcaagatcacacagcttagtaaagtcatcatttgaatcacctgcttgatgccagcatctgtgctcttaagaagtctgctcttccatcagggctgcagctagactagggcatgtgtggaggtttttcctgcctggcccagcctctgcctcaggtctctaatgagctccttttcaagctgaatcagaaacaacagttatgccacttcccttccagtgccatccccatcacttctctcaccaaggaagaacttctgaacccccgccaaaaccagttacccaaagcagcattccccttccccaggaggagccaggtgaggcccatctctcacattacacccctggagacccagggtccctaaatacagaaaggtccagacgatgatcagagcatcactctttccctcaagaaaaggagtccacataattctggcctcatcaaaatgtttctcagattccaaaagatgaccttcccattcctccaggcccactagcccttggcctggcatctggcactccctctcactcccagtcagcatctcccagaacagagcctttgcacctgcaagtccttccacctggagccattttctcccagggactcacacagttttctccctcccctcctccaggtctccactcaaatgtcatttccagtgaatcctttccctaccacctcatgtcactctgaagacccctttccctgctttatttatagccctcatgtctacttgaatctttatatgctcgtttactgtctgtttcccttgctctgtgagagaaaggactttgagttgtttcttactgcacctataagtacactgaaagcactaaacaaacatttgttgaatgagtgaatgaataaataaaggaatgaatgaatcagagaaaaagtcagctatggtataaagcaaaagaaaagaaaaatgaagggaagctggtaacctacagagccgagcctgagtcctggctctgcaacccatcacaggtctctgccacgaagtgccaggcactgttctgggtgccagggaatcgacatgaacaaagcaggcatgaacttctgccatattggagcttattttctaatggcaaaagacagatggtaaactaaataaataaataaaaaatatatacagtgcgttagggtggtaataagccctgagaagaaaaataaagccgggaaggagaataaagaggactagtgggagggaccagcatgcagttttaaacagaagagtcacagaaggtctcactggaaaggtgacagtggagcagagacccgaggaggtggtaaagtgaggcatgcagacctctggagagagagcacttccaggcagaggggacacagggctgcctggggtgtgtggctggaggaggggagggagtgatggggagagaatgtgaaaatgaggtcagattggtgatgggttggggagagggtggcttgtaggccactgtaaggactactgcttttggattcgaaagggaagattggggagtagaatggaagtcacacgtaacctagagaaaagatctagagagacagaaacctgaataccagtcctaacccacggccctaagaagtgggcaccctcttcatatcacataacaccaaaaaatagcttctgttctttttcagcaacctgtcccaacaatccttcctgcttgggagctctgttcttagtgcaattacattccccacgcttctagtaaaatgtatcttctctgagtttagccctaataaacattctaataattacatcgagtctctctagttcacagatgctgtatctaatcttataacctataatacggaagatgttatcctcacttcgtagagaaaccagataaagctcagtgagtttaaggaacttggccaagattacacacttggaaagggacagagtcaaaactaggttttggatcttctgacatccttctactttacaacgactaggaaccacccttcatgttagtgattctccaactatcatctacagtcttttaaggattgtaaactgatccgaaaaatccatattccctccttggtttttatgagtgacatacaggcaatctcatagattctgatgttcacgtataacagaaattaatttaactgtcacttctaagtgtgagagtgtcattgaagcttgctaaaatttgatatgcatgaatgtgttattaaaatggatggaaaaacttaattctattttgtactaagcagtttggctgctgcacaatacttggcaatgatgcaaaactctcagatatgaaataaatttcccctaaaaggttggaatgcatggtatatataacctgctaggtccctgcctcacctaagtgtagcccgaaggtggagaaccactgctctatgaccaacgttccacccttctttcctcttgatcaaaccaaaaaacatctttccagtctatattcattctctcttatttgagcacaaattctgtcagattgtaatatgggcaaaagcttggatttctatttgatgctagagtcacctcttgttccatcctgaaggacaacctctaagacggaggagaagaggctaggccagatgggacagaaaatcacatgggatgaatatcatgtgacttggcaactggggctagggttgccgtaaagggaaaagcaaggtagtttttggattaggtatgtcagctgtgccagacccctgatctttggcaaaggaacctatctggaggtacaacaacgtaagtaacctacttttccttcttatgaccactatgtttggcaattacatttgttaaatatttttctaagtcaccaggttaggaagcagtgctccagtaggtaatatagcaagggatggcttgaggaacaggaactgagtttccgataaaatccaggatggcgtctgtgcttcagtgagccgtcttgatccattgtccttcctagagagtttctattccctctacctggctccagaaagctaccctcctcaacatctatgcatccaccatgtacagatctaggccaccactgtgatcagactcacatgacagcacttcggggggtggacacaaggtgaaatgaggagcacgctgaaccagtaaatcagaggccaagttccaatctgtccaatgcattaactgacaatgcattagctgacaaactctgtgacttaactgcactgaactatagtttccctatagttagatgaaggatttccaagctgtcttccagcccttgcccactatgatcctgattatccccagaccaattcttatgaacaattgggaggaaaagcaaggaagcccaatggtgtgactgtcctattacccagtaggaattctgtgatttaatggaaaaaaaaaaaaaggcactggaaagggagtgaaaactctccctatgcatcccttaattagcccttgtgtgatcacagaggtttggaaaaatgatgccttgaggctcctttcagtcctaccatctattactctggttcaggggctggaaactggaaattgagtgaagcccaactcagccactcacttaaccacctttacagtgcctttgtctgtgagatggatctaaaaatatcacctcatagagtttatttcaataactttgttgaagtagtataaacaccagctgtttaagtaggaaagtatttatacaaatcatagtcatctgtgattattatagtcctttggatagaccccaagtcttttgcatcaatggctcttgctccaaccattgtgtccttccacctctcgctgaggcacagtcctgttgtgattgatttagttgaggcttgttgttacgtttctgcctacaacggccatttggcaattctcagcaaaatatgtgaaaatgttatcctgaagcaagatctgggagtaagagatggcaggttgaggagataatagcagaaaatctaaggacttgcctaagtgtcaaaactcagaagatagcagacatcaaaaaagctgccaaaatataatgctcagatctcagaaacccttgcaaagctctgtctccagctacacccattctgctccacccacccacttccaaacagatgaattagactgacagggagcaaataggtagcaaggtttttcgtaatgatgcctgtggtagtgctttgacagcacaactcttctttggaaagggaacacaactcatcgtggaaccaggtaagttatgcattttactacagctcagtgtgtatatttctttagggttgttgtagcgtagtcctgaatgaatggggcttcttgggaagtaaagagttccaaattagaaacccattgtttgttgcaaacagtaggggtaaaatttgggagcaaatgcattagatttctcttaagaaaatattctgtatatgcttggaaactccattctgaggcttggtattcataagttttttacaactactgaaaaaaagccctaggtcaggcttttagttttgggctccctagaaccaggaaaaaggcaagctgtggttgaggagggtctctccagtatttatgagggataaaagtcatggtcacagtgtaggaagagggaaggttagaaagaaaaaagtattacgaaagaaggagttttaaaaagaggatctttctctcctctctctctctctctctctctctctctctctggataagaagccaatcttgcccttgtcacttttttctgaacttgcattaaaccaacataaatggttcagattaaatggttctcaaggtcccatcctggcctgggtctgctgagagcagttatgagctcacctctcctgttagccctgaaactgggaactttgcacaatggttcaggagcctgtatccaatgtagaaacacagccaccaactccaggacaatagagaagtcgtggtcccctactggagacattgtctactggtagcctactccaatgtttggaaatccaggggctatattctggtagtttgggtagctgccaacagtcaatcactaagaccagtccagagaatagccttcagacaccttccaaaatgccaagtccattgggagagccattacctcttacatgattaggtattgattttgtttattcagaggaaataaataagtagggaatggtacatgaatgtggctaggctatctgaccaaaagtccaaaaagtgactggtgctgtcaacatggtctctgcctctcagagaataatataaacttatagggattctccactgcctgttgcctccagggaaatggtagaatttggtgagttttcttatctttgaggggagagagactagagcactgaaaaggagggaaacagaatcatgtcgtagctgattgtagtctgattgatgtttagcaaattgcatctgagcaaaaactactgtgtttcattttcccctaaaatcatttccacttgaaatttggaattatctgcagtgttagaatcaaatctttgaggctgtgcctttgggagtcttagggaagaaggaaattgatgaaactgatgcttagcccctctgccaggatgctgaccatgctccccgatgacactccattcgcttctctggttttcttctcctgcagtggtgaaatgtaatatgatgatgtgaagctcaggtaggggatgtgaaaattttcaaatcaaaccccaagtccttaaagctttgacagtgaataatggccctacacaactgtcattctcttttgcctggctctagcccaacgatcttgatttttggtgatgaggcagagtaattcacatggtctttatgttacattgcacatgatgactatatactcctgaaacttatatctggatccagagtcaggagaaattataaaacaaaaataagcaatgcaaagcaagcactggcttctctgacctgtgtccatgacacacagcaccagtgggctccctgagcagtgaccaatttcttgttcaaccctcaggtccttagaaagcctttcgccaagctcagggaattagaaagcaggttcgttattattgtgagactcagtctgagtgatgggggaaattaggtttctaatcaaaattctgtacttgtgacccaagagaatggaaccagagtataataagaatggaaactctttctataaccctcctctcctcaacctaacatttgttgtaagaaaggtcaagttaagtgccccatccctaccctcaagctattgtgttcttcttggatgcccctctcaataaactggaagttagattttccatcatgaaggcagctatttgtcacctgccaccctcttctcttgctctgtctcagccctgccctagtatctcttggatggggatatcaccctcacatctctatcaagcagttcaactattattagcttcaaagggaactgagactctgtgtactcagccccttggtctcatcaagagcagctttgtagttctctgagctgtggggtctctaggctgagaactgaggctggggaggcagggcacagatgttacagctcaggccccagggccagctccaggctagttacctgtgaggcactgtcataatgtgctcctgggacacccgacagatgtttttcggaactggcatcaaactcttcgtggagccccgtgagttgatctttttcctatatttctgggataatttgagtcctggcactggggctgcaatccagtttgcattataaattataactagtaaatgaaattataacaaggagacagagtattacagatgtgaaataggccagagtgaacacactagactgagtcacttaagtagctctgtaactctatttattttaatatatatactctatattaaaacaatagctcccatttatttctgaaatcttcagagcagcccaaaaaacacaaagaaatctagaagaactacactaagagttggagcattcaggtgcaagggagacagtgggagggatacttcagccccaattcctcaggaagctgcttcatctctgcacatccctttggctaagctaactagtatgcgtgcctccttgcaaactgaaaacaagtgtcctacagcttggaagattctggagaaaggtagttagcatggtcagagtaattaggtagaacaaacttttatttcagggtttaagttaaatcccatattggcagaaagtcttgaaattctgagtgacatttattacagttgttgcaattcttaggggatcagtaggactagctatgagaatctaaaacataggtgacttctaagtttataaattaagaaagactgttcaggaatggtacacacttttttggtattgtttaccagcacataaacttagcaatgtattggtgttcataaaaagagaaagtctgacaataaagcaattttccaaagaaataacacttgaaacacatgttgcaatgtaattatatttgtggactaagaaaaaaagactacaagttcttcaaagataaacgattaaatctttaatctaaattctggactacaatttcatacagcttcacgtctgggtttaagtcaaatacaaaatagactaggatgcatatggcaactatattgagtgcactccagtttttaaaaaggtttaattcagtcagacacccatttctttggttaccaagatgccaaacaatggattctataagacactttctttcaaacaatcgttttgaaaatataaacattaatgtagaaagagggattcagaaaaatgttttatcaaatcaatgtattatgctctatctgaaatgctgactaacagagtcagagcacaatatcataagtgcatgaccttcttcagacatctgtcttttcagttatattgtattattcaaattactcaaacccaatctccccagcccaaagtgatgatttgacaactgcctgatgaatttagcttttaaaattctagcaagccttaattatccaactaaatcagaccaggattaagagatactcttaaataaacaaggagatagggtgtttattttatggacaagtttcttttgtaacttgtaactcccttgaaagtcagccagagtatgtctcaaaccaaagtcaagatagtgagcaagaagtgttgcacttatgaagggaggtgagtgagcaatgcatgtggtttccaaccgttaatgctagagttatcactttctgttatcaagtggcttcagctatgcaaggaaaccaaacaggggaagttttctcaagcaggttgaaagcaggttccaagaaagccctttgaaaaatgtctaatcctttcaattgtctagaactaaagccaaaaacataaggaaccagattcttaggaataagtttcctgccctgagtgactgaaacagaatcagtcttttagttgagcttctcagcagaggaaacggggagaatgatgatggtagtgatggggggtttctctgaatagttgattttctaggaaaaccatgatcaactttggtccatttacaaagccgtgatcagcagaaacttcctgactagcaatcgccccctctcaaccagatataaccagttgatctggcagtagctctgctgctgtgaacctcacagctgaagcccaaattcagattcaggataaagcattagaaaaattatttatttttatacagaaaattagccaggtgtggtggtgtgcacctgtggtcccagctactcggaagactgaggctggaggagagtctgagccaggaggcagaggttgcaatgagttgatattgggccacttcactccaacctgggtggaaaagaccctgtctcaaaaaaaaaaaaaaaaaaggaaaaggaaaattacttattttccatttacacattcattaccaactttctgttcagcaacacctaatgtcttgattatagaccatagtaggtaaaagtacactggaattcaatgtatttttcatttgatatcaagaagcaaaattcacctaagtttcaaatactaagggccaaatttacaggagcaattaatattaaaagtcagcattaaatttaggattgaaaaatgtatcttgatcatcattcacaggttggttgtgtttcttggtttcaggtattaacagggctctttctttaacagttatttgaagatagcctaagaatttaagtccccatggacacaacatttatcacaattcaaaaacttcagtgaggcactgtgtgaaagaatcatcactacctctctcaaagcttcaagacttgtggtcttaaggaaagaaaagtatgcatgtacagggtggtagtccaaagtgaggcacaaaagaagagaaggccaggagggaagccaatcctgggaccaacattccacagttcctcttagattaaaacaagaatgaacgggcttcaattggttttatttctttaaggacttcctgaaaatgatcattgttatcctctgattaaagactcaaaggaaactatacagtagtcagtcccctacagaagaatgagtattcacctaaaggcagaaacatgtaccacctaccttcagcagatccctttccaccctttccagcagatctggaagggatggcacccttccgggaccccaacactgccatcctcagaacctctgagccagttatgcagtccttctcagaccctcgattctttaagtgacagaatgcatagcatgagcacctgccctgatctaccatccaagggcccatgcatttacaaaaaaccaactggtgcagagagatattcagcctgacctagattgtccagaggattgattaataaaacacagataatcggctggatgcagtggttcacacctgtaattccagcactttgggaggccaaggtgggcggatcacctgaggtcgggagttcgagaccagcctgaccaacatggagaaaccccatctctactaaaaataaaaaaaattagctgggcatggtgatgcatgcctgtaatcccagctactcgggaggctgaggcaggagaatcacttgaacccgggaggcggaggttgcagtgagccgagattgcaccattgcactccagcctgggcaacaagagtgaaactctatctcaaaaaaaaagaaaaagaaaaaaaagaaagaaaaagaaaaaagccacagataatcgaaacccagatgatccagaaacttctttgtagttgtcattttccatctgtgcttccagccctatctcctagcagctcctaactggaagtcaaacttactgcctttcatttctgctccccttgcctgtcctttcacagaggtggtaataagcccaggtcactaacaggatgcatggaggtctggattgtagtgtttggctccagggtaatcgaggtaatcaccactgtttaacccccacaaagttgtgaataatcatctcacctaataagttgattatatttgcaggaagtcagcctcataccaaaccatccgtttttgtcatgaaaaatggaacaaatgtcgcttgtctggtgaaggaattctaccccaaggatataagaataaatctcgtgtcatccaagaagataacagagtttgatcctgctattgtcatctctcccagtgggaagtacaatgctgtcaagcttggtaaatatgaagattcaaattcagtgacatgttcagttcaacacgacaataaaactgtgcactccactgactttgaagtgaagacagattctacaggtaggccatttctagcttcaaggagctggagattatggggaacaagaattgggtgaaagggaagttagagatgtaactgtggacaaatcattctcagtatagcatcatgctggaaataagacttaggcccaactatagcctgccattggcaggggagggaaatgcttgtcatccctaagatggaatctaaaataaagcccatcttatttcttcctcatctctcctctttacctaccactgtccccttcatactagactctgggattgaaagtcctcgtgcattctaatccagtgctaaattccaacaaagggcaatgcggcctattgtggggctaagaatcctagttcttcccgcatattggtgtgcctggatgttgacctcatggtacaatgaaaaaggctagaatgggaagcatgttgtataattagctatgtgaccttcaccaagtcacatcctctggtcctcagttcactcacccaaagtctcctccagttttaaaagcctacaatcctgtgagcctcttcattcccaatgtaaccctgaccactgctgtttgttccagatcacgtaaaaccaaaggaaactgaaaacacaaagcaaccttcaaagagctgccataaacccaaaggttagttcaaatcaaagggccaacttcagaatcaagggttaaagcaaactctgtaattgtccactggggccaaaatgtatcagatttcaaaagaaaacacaaaccatgctgagcccagttggttctgcagagcctctgactctcccagcaaggcttacctggctgtcggcatcggtttcccaagcttgcctggctgggtgtcagcagcagcctaaggtctctgacggctatctggcaccatgctggacttgcaggccagaaagaactaggcagacttggggcaggctaatatcagtgttgcaggcccaatttctggaagggaatttaatctctccctgaagccaccctcttcactctttttcagccatagttcataccgagaaggtgaacatgatgtccctcacagtgcttgggctacgaatgctgtttgcaaagactgttgccgtcaattttctcttgactgccaagttatttttcttgtaaggtaagaattagccgcttcttattcctatctctacccacaccatgctgcacatggggaaaggggatttagaaatggctaagaaaccaagaagcattggaaagggaaaatagagacatacttagaattaataaggtaggctatctcagctactcagcaaaacagcaccccatttcctgttatcctttcattttgagtcagactgaaacccattaggtagtataatgtactatttttctaatataccagagaataaccctcactttcactccagggagaaaactgaagataaataaggagaattcatcttctttactgctattttgttcatcgaccaagagaccatgggttatttgcaaggccataagtaaagctttgcctgaagactatccagaggaagcagaacctatctttgtcctgataaagggaatgccagctcacactccttaatcataggaccagcctgtctatgtgtggatcagcctgtctttgggatgaacctacacacagcattagtagtgaacagctcactattagctactcaggatgcatacacagttaggtttgagatgtcaattatttgcctgttacttgcattccgttctcaggtaatctcatacacgaaattgaaaccagggcctgggtttgcgtgtgaggcttctccccctcactccttctccaatactcacaaatgctcatcaaccccagcttctgttctaggaacaaccctagactcagagtacttgactgatctgacccagacagtaaacatacccagtcatctcaaaaagggggtccagctcacctgttattttactaacagtcccagggacacaggcagtgtggctgggtaaaaagagagctatactaagagtcagaagatctgggttttatcctgattttgacactaacttacatgttaccttagccaggtttcttcatctctctgggcctgggtttttgcatctgcaaaacaaatgagttaaaaaaaataataaccaaaggagaacaaaagagtctcatgacttgtgccaacactgatagctgaactagctgagctattgccatgtgtacatggaaagtgagccacaatagattagtgatgtctgcaatggtacagtatagcaagtaccggccaaccccagactacatgacccctacgattccttctagcactggcagtctattctataacaactttcttcactgcaggctgactggcatgaggaagctacactcctgaagaaaccaaaggcttacaaaaatgcatctccttggcttctgacttctttgtgattcaagttgacctgtcatagccttgttaaaatggctgctagccaaaccactttttcttcaaagacaacaaacccagctcatcctccagcttgatgggaagacaaaagtcctggggaaggggggtttatgtcctaactgctttgtatgctgttttataaagggatagaaggatataaaaagatataggactctttttttactcctacaagtgatacactttgaaaatgatgttttgttccttttgactttctttaccttttgaagtagaaagtgggaaccaacaggttcacagcttcattcctcatgaggcaaataggccttgggagaagaagagcgggtgcccttttatctaaacatggaaggctctgctcaactgagcactagatttgctacaaaccagcatcatcttcttcctcctgtcctcacggcttgtcccaccctctatgttcacttcaggagccacactagagattctgcatggcgtggaggaggacaaagtttcagcactttctgcctctcctaatactttacaaatgagattacatttgaatttgctaatactttatgagcaggcaatgaggtttccaaaatctcatctaaatactctccaatctattagcaaaaatcagagtaaaatacagaggaaaggcactgctttctgttaattgatttaacatgcatgaattagctccctctgagttccaggcactatgctgagagtacaaagaagacacaagtctgctttcaagcaactcactgtgaaagtgtttttgaagggaggaacagaaatgagacccctatctttccctataaaaacaacatttttactgtcttttgcctgccaatctgtatttgaaaccattggacactgattctctggcctgggactttggcattgatggttttctgcctttcttctcagcctctgcctctattgcatttattaaactgcattgtgtgc

SEQ ID NO: 13 - DNA, 9228 bp, Homo sapiens
ccgctgttatacgtcacttccacggctcagcgtcaggcaagttggcctctctgttgtaaattagtggttaaggttatctattattgccacttttccagcgctaaaggctgttttggaaccagtgttgcttgttccgcgggtgattggcttttttttttggcaaaccagttattcaagtttctggtctttaaaaaactctgtggcggtacggtaaccgaggaggttccagcgcggcggaagtaccccgcgggtgggtgtgtgcgcaaggccagggccagaggggcacgtggcgccggtgagtggccgtagaagccggaggatttgaaaatgctggacgtggaacccaactgccggagggagggaggaaggaaggggatgcggtgcgaagaccttgctgtctgtagggggaggagatactaatcatggggcggcaagggtggtgtgtggtcggtcggcgctcacgagaccatggagaagtaaactcttcacccatcaggttggtggtcactggctgtctgaccgtgggtgaggtgacagggctgcttttgtctcctttatggtgttctcaccgcagctccgaggggttggagtatactcagaggctacagtgatcagaagacataggtcgtttttttttcatcagggaggagagagaatgtcttttcgaggcggaggtcgtggaggctttaatcgaggtggtggaggtggcggcttcaaccgaggtggcagcagcaaccacttccgaggtggaggcggcggtggaggcggcggcaatttcagaggcggcggcaggggaggatttggacgagggggtggccgcggaggctttaacaaaggccaagaccaaggacctccagaacgtgtagtctgtatgcagtcttcagtatttagcttatttgaaggagtaggtgtgggttgggggtttgtgttgttaggcagcaagtttgggatacacaagcctgtgtggagaatgtagcatgtaagggtggagtggggagatcaagaaagctgagggatacttagaatgcatcttggaggtggaacttgagggttgacaggaagatattaaataggtaatcgtgagtacttatgcctaattccccgattttacagatgagaaaactatgatttagagttaagtttttttgctggggtcataaggttagtgataagtgatcaattagtgatatagctgaaatacaggctgggtgcggtggctcacgcctgtaatcccaacactttgggaagctaagacgggaggatcttttgaagccgggagttagagaccagcctggataataaagcaggagaccctgtctgtacagaaaagaaagaaatacaaagccaagtattctgactccaaagcccatgctttctgttactactcaaaagtagataagtgagaaaacaatttgcttgagagggaaactgccagagaggaaatctagaaaaacacctatttagggtagttttagagtaattaacaatgagatgggaatggaagtcacagaaagtgaaacttactacattaaagaggagagagggtgagtagtgtctaactaagaatggcttggatgagtatgcaggatggtttgaaaggagcagtttctagaataaaaggtcccagcccacaagctgttgtaccagtccatacatgagaccttgagagcctgaatcaggatggtgacagtgaggaaaaaaaaggaagggttagataggagagagatttcaaaggaaacaaaatcggtagaacttagctaatgctgataataaagggttccaggttttgagcttgggtgataggaatgaagacttggttttgcaggaatgtggtattttagtttggggtgacagtctagttagaaataaaggtagttattttgagattccagatgtccttgaaaacaatgaatcattgttaaagaggtggtagtgggaatggaaaagttctaaggcaagagaaaaaaaaaaagaatgaaggctgattctgttaggcattgaagaaaagggagaaccaagagaatgaagcagagttttgaatcagataataagttgtaataacataactgttacaggttgaatggtgtcagtgtgccaggcactgttctaagcacttgacatttgttattccattgagtgcttacattactgtatattaggtatagctatacattatatgttattagtgcatactaaaaatgagacactgaattagagagagggtgggtaacttctcctaggtcaaatagctagtgtgttgtggagttggtataccagcccaggaagtcctaagactgtggtcttctgcctcagaggagagcagttatggtgaagtcccaggtagccaaaaagaaagcttccagaagcagttggtcagtatcgtttgaaatagttctatgttttaacattttcttgtcctgtttcagtattaggagagttcctgcatccctgtgaagatgacatagtttgtaaatgtaccacagatgaaaataaggtgccttatttcaatgctcctgtttacttagaaaacaaagaacaaattggaaaagtggatgaaatatttggacaactcagagattttgtatcctttttcattggaaggcctgataatattcaaaggttgctatttgcatttttctgaggaggcagttaagtataaattaaagttgttgcttcattaaattagacaggattgctacagattggaccatgaaggagaatcaaggggagaatgtattcatccatagatattaaaatgacagaccctagaacggtgactttttttttggaaaattctattaatgatggccatttggataagtactacaggattaagttggctgatttggatgtagtggtgccactggaaatgtagaattagaagttgtttggtgcccccactactctggaaactccttccttcctttctctctctctctttttctctttctctctttctttctttctctctctttctctctctctttctttctctctcttgctctttccctgccttcttccctccctcccttcctcccttccttcctttcttttttcctttttttttttttttttgacagagactcactctgttgcccagggtggagtgcagtggcacgatctcatctcactacaacctccgcctcctgggttcgagcaattctcgtgcctcagcctttcaagtagctgagattacaggtgagcgccaccatgcccggctgatttttgtatttttggtggaggtggggtttcaccatgttggccaggatggtctcaaactcctggcctcaagtgatccatccgccttggccccccgaagtgctgggtttgcaggtgtgagccaccacgcccagcccctggaaattcatttcttatctttcctatatatatccatacattctaaccttgtttttgaaattatacatgaattcagaacatttgatatcatctttcatcttaattgctcatttgttccttaatgaaaataatagtatttttcagttaagttgtcagaaaacatgaaggcttcatcctttaaaaaactacagaaggtgagtcaaacttatgatacttgggatccttggttttataagggaacgacctatcttaggaaagtcctacttggagcacttgagactttcccaacatatcactagtaaagctcttaaattgaaatgttccatgctataaatattgaacacactaatctttaaaagtgatttatttgatacagcctttagaaagtaaaaattacaacttttgctcatattaccaaaatctgtaaactgctagagtaagagttttttgtttatgtaaaactctcttattgaaaagctttcatgaccaaacattctaggtagaatcttaatttgtaaaacttacgttatttgagaggcggtaggtactaagtgatttcacaagaacttcaataacatgatatatgctatgaaggaaaaatacaggttgccatgagaagctttgtagtgccaccagctttttaagtctgtagtgtttcctgaaaaagtgagcttgaagctgaggcctgattgttgactaacagtgatttccacacctggttgcatgtcagagttatcttggggagcttttaagaagatgtatctctagtttccacttctggaaatttgacctaggagctcttaagtagcgtccaggattcaattttaaaaaggaaaagcacttggataattttgatgtagttagtcaaacacttgagagctgctgagctagtcaaagaggaagaggaaagtgcattccaagtagagaaaacagtatgtgcagtctctgagagcaggcaactgaaaggatacaaaaaggcagacatataggttaggaatgaaacatttaggagaggtggggaaagttgtgaattaagaccagagaggtaggagggggcttgattaacttaagccttcaggtgacaggaaagagtttagaccttagtttcaattgtgttttatttttgaataatgggataacacagttaaatgaatgcttcaaaagaatactgggaagataaaaaggcaccttgggaagcggtcaatattgtgtgagaggggccagataggaggctataatagtagttctaaaagagatggtattttggactcggtagtgacagtggaaatggaaaaaatggatttatgaaagatacaggaagtagaatcaataggacttggtaattgactagctattgaaattgaagaagtaaaaaaatcaccatctttcagatgtctgacatcaacatctttgtgggtgatggtaccaattaatgaaatgggcaacaatgcagaggagggggattgggggaagataatgagttgggttttggacatagtgaggttgaggtacttgtgagacagtcatggtcagtttaaaggaagagtctagactggaaatagaattgggaatttgttaagtatacagacagtacatgaaacattgtaggaagaaagaatgaaaggaaaagagcacctatgaagagttttggggcacctcctaaaactaaaggtctggtagtggaaactcagaagtaattgccagttaaaaaaaaaaaggcaaaccacaagcctgtcataaaagtggtatcacaaaaattgaaagagtgtttccaggagggactgctcagctatggcaaaaggctgcaaagtgttcattggaagacagccacatagacatcagggagtcatggagccagtgcattggtgggcccgggagccagaatggattaggaaatgagagggagacaatagcttgttgtcagcatatggctactagttgtagaaaccttggcaagtactcaggggattgactgcttctggcgtgcctggagctgttgagcccagaaagaaacaatgctgaaaagggattctcatcttgtgacctgaaaaaaaaatgctggtaatagccacttaaattcatcagaatcccttaaatcacttaaatttctcagaattatttatttgggggcttattgtttagttttttgggtttttgctttttaattacagatactaacttgagtacattctacctctcccggtttccataccccctgctatgttgagattcagccctccttacccagcctgcgttattgtgaagtttgtagaccagtgctctccacttgaactttttgtagtgatgggaatccctgcccagtaaagtagctcttagccacatgtagctattgagcacgtgaagtgtggctcatgtgactcaggaactgaatttttaaacattaattaatgtaaatataagccacctgtggctggtggctgccatattgaacaatgtagatctagacaatatttttgagatgatgggctgtgaagggaagatgagtaataaggtgatatctagagagggattcagagatcttattataagtcatatattacagttttgaaatcctcgtgtgttttatgtagaagaactatgatacaatatgctctttacatctcattatttgagaaatgtcctctttaaccccaattataggatgggtatagtttctgtatatccttcattactttgtgtgttcagaagatacccttttgatcctttattaaagacttgaaacaactagtatgcgaatgctttattttgaattttaatgctgtgttttttaatagttttatttttcttacggcagttctgttgagtggaaatgttaaataatctatttctaaagagaaatgatattgaattggtcttgattttttaatatgcatgtaatgcttattgtgtgccaaagtacaagtgccttatatacatcacttttttgatcatcacacaaacatgtgagatagatactctattctctacattttacagataaggaaactaaggtaaactaacacaggaatagaaaaccaaacaccacatgttctcactcgtaagtgagagttgaacagtgagaacacatggacacagggagggaaacatcacatacctgggcctgtcgggggatggggggaaggggagggagagcaatagggcaaatacccgatgcatacggggcttaaaacctagatgatgggttgataggtgcagcaaaccaccatggcacatgtgtacctatgtaacaaacctgcacgttctgcacatgtatcccagaacttaaggtaaaaaaaaaaaaaaaaaaaaaaaagaaacctaagttagtaagaaattaagtctctacccagggatatgtagtagaaagtggtaggattggggtttgaacccaggcagttttgactctatcatgtagcttcttaatgattatattatactgtcccccaagttgtatactaattgcttctattatgtttccagttttatatagacccatataagctgctgccactgcagaggtttttacctcgacctccaggtgagaaaggacctccaagaggtggtggcaggggaggccgaggaggaggaagaggaggaggtggcagaggtggtggcagaggcggtaagttacttggggaaaatttctaatgaaattaactgtgactttcacagctaattcatacaatacaatttagctttgtacatagcaaacctcccttatggttctttttattaaagctgctttccaatattggcagattgtccataataataatgcttcatttcaacaacttacttaaaaagaagaaaatctactaaagtatacttttgagggacttcatttctttgggttattcatgttttcttggacattttaataaaccgtaagattatcttaattttaattccttagttaatattattgagtgtagactgcatgctgaaagctggtcatacattcttttaatttccatgtatatatttttaatactcagcgaaaccttttgagatagatgatatccttattttatgaatgaggaaacggagacttacagaaattaatttgccccaatcaaacaattggcagacccaagaattaaaatgcatatcttctgatgtcatgtcaagaactattactaataaattcattactgtgatctcactgttgtgatgtatgcctttcccccaaggttttggggtattttgatgtatgcctgttttgatgtatgcctttcccctaaggtttgggcacattcatcattatggacagctaggtgatgagcagggctctggggagtggggctgccatgccctgtgagtaggagaagggcgagtgatggggtgatgggcagagccaaagtggaaagggagaggagctgaaagttgggcttggacagcttttgttactggatcagaaaaagagaaggaacgcctcacttttggcgtttctcaatttaatcaccatttcactccataaaggtatttttttgtgtccatataggtaggaaaattctcaggggtaccttcttgagaatttgatgaacagagattcccctattctcatgttatgttgagtatcatttaacatttcaaaaaattcacagctgtcttatttttttaaaatcttacttatgtagctcagttaatcttaactatcatatttattatcttacccccagagcaaaagcacccatatctgccaccctttgttgttaggataaaaagccacagttccatcaaactatccttagttgaatcaaaaaagtatttatcataagcaagagctaaggcaatagtcatacatttaacaagactgaatcatactttaacaagtttttctaatttattgaaatggaataatctggggttttagcctgttgcccagttggtaaactactacagtttctccatttttatcttctaaaattttttccctgataaaatatgtgaatctatatttattcattataattatagttattgtattgatctttttaggcttatcaatataagaggttatacagttaataacttaatgattattatattctattgttatttaaatactttgcgttattatttaataaatgttttttaggtggttttagaggtggaagaggaggtggaggtgggggcttcagaggaggaagaggtggtggtttcagaggtgagtattttaaaaagtctttaaattgcttaatgtttaaaattgatattatctggcattttctgtttttacttaagtttaattttctctgccagcaagtatatagaacaccatggtgttctttgcttagcctaatttgtggtttcattttatatcactttttttttgccttttcttttcaattttttcacctaattctaatttgttttgctttattattaatttgaaaaataaaggtgtaatatgaatgacagttaaatttggtaaagtatgtttgctaaacattattggaactaatgctgattttaaacttgagatttaggttataatactattaaaaatccattttctgtgcccttaatactttaattttctcttaatcagggagaggacattaagtgaaacagttgacagacatcaccagttgacttctgcattaacctgcatgatctgtttctactatggattggaaacttgtttcttgaacaagtcttgaagatcttggtcattttatgacaatggatctaaaatgtcagcatcatgcaaagtgcaacggaatagtgaattttgctctaaaagagcatgaacaagtctttctaatgttttgtacagtgcctggcactctgtgggtgctcaataaatggataggagttttcatttgaagcatatttgaatttttaaaataaagtgttttattcccttaa

SEQ ID NO: 14 - DNA, 37768 bp, Homo sapiens
attcgctgcggagccggaggaggaggggagaggcctggaggacaccaacatggtgaggcactgcggccgcccgcccgccctgccggctgggggccggcgctgccgcgcacccccgccccggccgccctccgtcccgcggcgaccctgcagccccgagcctcggcccgcggcctccgtcccgctcccaggcgggggctctcctgcctgcctctcccttcctccttcgccccttcccgcccgggcgcagccgctacgcgagagccgaggaggcggagcggagccgggcctagtcgggagccccggggagtttggggcgcggggagcggccccggtgccccttgccggggcccggcgcgggtgggggaggcgttggggcggggggaggggagggggcaacggccttgcccctgcccctctgccggctccattgtgtctggtcggggactggggtctggggttccgggtgagtagcctccccccgccccgaagccggggcttccctctccgcccggccggggagaaggaaagactttcccggcgcgcctctccctcctccgctcccggctccaataccccgcaagtctcccaggcagttttgcttggggcggggtatcagcccttttcctttctccatcacctctcgaggcgtcccatgcttttggagaaggagagtttccccggccagttggtggaggttatatttacctctctactgaaaacatgggagactgctgagcttgggggagggggtacggaagtgcaacctgttctcatttcataaaattagggaacacagactagcgagcgccctttcgagcacctattttatttgcttgggggtgggaggagtaattgctttattatagtagttaagggccatttgtgattttttttaaaacagtttgtcaagttactctccttttttgtttgggggggggaaaaagtcctctccaggcttgcagacccttgtggtcgagttgtttactttggtaattaagtacctgactctgctggacgctcttcgcgtttcagaagcgctgtttggcattgtacagtctgagcgtgagttgaattccgtgcaggttactgtatgaatagtaaaaatgatattgttgtcctttgctcgtggggaacataaaggcctctttgaggagggtgtgtgtgcgcgcctgtgttaagggaatgctccagtgtctttgtttttagttggtcttatttttgctgaatgacacttctagtcccatcctccagcttggcagtattttgttgtcatgtatggatatatggtttagtctgacacatatttaacacttatgttctgtggcaagttgtgtaggaatttacagtttgaattggtaagaaaactttaaagtgcaggttaatgtatagattagtattacagtgttcagagatccaccaggcagtctaaacagtttctagtttcttaagtatttagatggtcatagacattactcctgaagtttccagactcttagcatttagataagtatagtaagctcgaagtaatgacgttaattccctgggaaacactcagccacagctgaaatgtgtgctcttcaggatggtctccagatccgcatcatcccctagacagtggggtcccggaaatactcatcacctgttcaggaattcaggcatcaagtggttcgtagggagagttcagcttgtaagcttctattcttttggttaatattaaaattagctagttttgaaacttagccataacccatgtaattctaccagtggtgacaagatattaatttaaaacatatcctgtggctgaactcagtttatgtcatgagaattgtcgtgatattctctggtttagctaactcaccgtaggggctgggcacggtggctcatgcctgtaatcccagcaccctgggtcaccgaagcaggaggattgcttgagagcctaggagtttgagaccagcctgcgcaacatagtagtgagactccatcccaaggaaaaaaaatagccaagcatgctggtgctagcctgtggttgcccctactccagaggatgaggtgggaggattacttgagctgggaggttgaggctgctgtgagccctgccactgcaccactccagcctggctaacagaccttgtctcttaaaaaaaataataagaaaggaaagagactcaccactggccctaatcgaagttaggcagtaagaattttatagttaagaagttgtttcattataaagttatcttacatatatttgtttctttatgcagtttcggggctgtgagttttttggtgtctgtagctgcagcccatttccagagcacatgttattgtcagttctagagcaaacttaaatgatgggatatttgaaatactttgtataagtaaaaaagttctgttaacttcctccctccccccacacacagactaaaaacgactccaaaattagataatattctgttactttggaacttgttttttgttgttgttgtttttttttttttgagatggagtttttgctctgttgcccaggctggagtgcagtggtgcaatcttggctcactgcaacccgtgcctcctgggttcaagcgattctccagcctaagcctcccaagtagctgggattataggtgcccgccaacatacccggctgatttttgtatttttagtagagacgaggtttcactatgttgacctggctggtctcgaactcttgacttcaggtgatccacctgcctcggccgcccaaggtgctaggattacaggcgtgagccaccacgccagcctgaaacatatttttaaaaagtgttcggctgagtgcagtggctcacgcctgtaatcccagcactttgggaggccaaggtgggcggatcacaaggtcaagagtttgagaccagcctggccaatacggtgaaaccccgtctctactaaaaatacaaaaattagccaggcgtggtggtgggggcctgtagtctcagctactcaggaggctgaggcgggagaatcactggaacccagaggaggaggttgcagtgagccgagatcgcgtcattgcactccagcctgggcgagagcgagactccgtctcaaaaaaaaaaaagtgttcaaaacgtgtgggttgttttatttataagatggcaggattggacttgatgatttctaaagtttcatccagcatagacattttatgattctaatgatttttagactcatagcatcatagaatttttagacctgaaatagactcagagatcatctaattactcctccccatttttacacaagaagaaattgaatatcaaggaggttttgaggttcaggtttgcaggattgttggttgcagaactgaaactattttctcctggtctaccatttcccccagtattatctgttaactcatatgaaatccagaaaattacatttgaaattaaatcatatccatcacttaaacacaggaaaccccatgttatttatgaatatgttaagtaacaaaattcatattaatgggtgatcaatgatgttaatgcctatgttttcaatggctttaaatatatatgaactttgaaatttaagattatgttgtcaacaaatactagaatttgtaaattcaaatacatgtaggtctattcaaggttgtcttttcataacttgttgcacattctttgcatgtctacaaataaaggaggttatcagttcttttcagtgattattatacgtctgctgtgtgctagagatagtgttaggcactgaagggatgtatatatcacagaagagacaaaaatcctcactctggtgaggggtaccttttagtagggagacataaataataaacatagtatatagttttcttctttactatgttagaaggtgttaagtgctgtgggagaaagcagtgttagggaaggggattgggggtgctagggcattgatggaagtagggttgctaaatatctgtatcaccaatgagataattttgaacagagtaggggatgagggaataagccatgcagaaatgtagaaatcttgaggaacagtgagaccaatgtggctggagcagtgtgtgtgtgtgtgtgtgtgtgtgtgtgtgtgtgtgtgtgtgtatgtatgtatatgtacatgtgtatatacagggggtcgttggagcagatgaggcctaggtggcaaggagtgggggtaggcatgggtggacactgtaaggatactgggcttttatcctagagaaatggaaatccattgaaggattctgagtggtacgatataccttgtttttttttgttccatagtgtcctgtgacagtattacagataattatttttaaaagcagttttttcagaagacccttattacagttttctttaccatgcagcttctatgtacagagttttgaattctgtttaagatgactgtctaatgttcaataaaaactaatggattatcaagtatacctagccacactagggttaataaaaacacaaccaaacctctttgatagattgttgaatatgttctagtggtttatatgtagttcagtgactatatgcagaaaactgggcctttggggacaaagaaacgaaattaacatttatcgagaaggtacactctactagtcagacaatttacaattgtcattaatctccactcccacttctgaaataggcattattactacttttttttttttttttttttttttagcatatctgggaatgaaggcttagcgattctaaatgatttcatgctagtatgtggcagagcaggggttaggaccctggtctctggttccacacttttatctccccctgaccctcacctactcccatttttctgttttttgttttttgtttttgtttttttttttttttaacccagcaagcactccttcagtgtagatgtggaatctttgtttagttttactctggtttcttccttgtcatgctgaataatagtgacctagttgtttccatatccaatcaaatgatctgatgtaaacattaagtaattgaaaaattataacttttggtgcatatagtaagaaagttggaggtacagttaattctgtgttaatttttggctgggcgcggtggctcacacctgtaatcccagtacttcggggggctgaggcgggcggatcacaaggtcaggagatcaagaccatcctggctaacacggtgaaaccccatctctgctaaaaatacaaaaaattagctggatgtggtagcaggcgcctgtagtcccagctactcaggaggctgaggcgggagactggcgtgaacccaggaggtggagcttgcagtgagccgagatcgcaccactgcactccagcctgggcgacagagcgggaccctgtctcaaaaaaaaaaaaaaaaaaattctgtgttaatttttttaaaaaagttttaaaagaacaggtcatttgggtcaagtggctgctttgattgtgctcttatagattgggtcaagcataaggaaagtctgggagaaaactccttttaaatttcagtattaagttgttcaatactgtgtttgccatgaaatttgatgaagagaaatagttccaaataggattcagttgctttgtggacagaaacaagctcttgactaatttatatagccactttaggtgtgcgcccacccccacaagaaaaagcaaaacagaaggaaaaaaaatcactgaaatagtcttttattactttattgaatttgttttatataattagtacctagtcactgagagtgattaggctgcttgtctgcattatgggatttagtttttttttttttaaagtctattatacttttgaatcactcaacacagagataagttgctgaagtacacagcccattcccttattagagtattttcattttaataaacatgtggagtgtttattcagaggattctaatacttcctgatttaggatttgagaaaatatcaaatattagaattagattttatttttcaaggatcatttattctgtctgtgaaacaaatatagtatgttagaacttaaccgtggaattttaaaaatctcatttaatttttcattttttgtgtgttggtttttttttttggcctcagtaatcttttgttaatttaagattactttagaaaacaatgttaaaggaaagtaaatttaaattagctacttggatttcttgttagaagttcaagaaacaagtttgagagaatcaattgcgatatgatgactaatccaggtattttaagatggttattttttatttatcataatcagaaattagcaaaaataacttttgttttttgtttttttgagacagggtctcactctgtgttgcgcaggctggagtgcagtggtgcaatctcggctcactgcaacctctgcctcctggattcaaacgattctcctgcctcagcctcctgagtagctgggattacagacatgtgccaccatgcccggctaatttttgtatttttagtagagacagggtttcagcatgttggccaggctggtctcgaactcctgacctcaagtgatccgcccctctcagcctcccaaaggagtgcacctcctaaaaggccgggcgcggctggccttttgacttgtaattttgactagtaattctgaggggtggagagaaaatcttttaaattttcattagttgcctactttttaaaaacctgttaagaaaagtatacaaaagtctacaaaatctatttgaatcttacagatatacttctgaatttttttttttttttgagccggagtttcgcacttgtcacccaggctggagtgcaatggcacaatttcagctcactgcagcctctgtctccggggttcaggtgattctcctgcctcagcctcctgagtagctggggttacaggcgcacgccaccatgcccagctaatttttgtatttttagtagagacggggtttcaccatgttggccagggtggtctcaatctcttgacctcatgatccgcccgccttggcctcccaaagtgctgggattataggcgtgagccactgcgcccggccacttctgaatttttgaaaggtagattgccataatgtatcattgtgcacaataattacgtagtatgtatatcattcctactggacttagtagtacagtaataccctcttgtctgtgatttcactttgctcgatttcagttacccgcaatcaactggtgatctgaaaatattaatgaaaagttccagaaataaacagttcataagttttaaattgtgcgttgttctgagttagcatgatgaaatctcactgttgcagccgttggtcatccctttgtccatcttattcatgctgtattcactgcccactgttagtcacttagtagctctcttagttatcaggtcaaaaaaacatagtgtatatgtgtatatatagggttctatactatctgtgttttcaggcatccactgaagtcttggaacgttcctccctcccccatgtggataagaggggactaaagtaatacagagcccccccctttttttttgagacggagtttcgctcttcttgcccagattggagcgcaatggtgtgatctccgctcaccacaacctccgcctcccgggttcaagcaattttcctgcctcagcctcctgagtagctgggattacaggcatgtgccaccatgcccggctaattttgtattcttagtcgagatggggtttctccatgttgatcaggctggtctcggactcccaacctcaggtgatccgcccccctcttggcctcccagagtgctgggattacaggtgtgagccactgcgcccagcctcttttttttgttgttgttaagactgggtgttgcactgttgtttaggctggagttagtgatgtgatcatggctcattgcagcctcaactttctggactcaagtgaccctcctgcctcagtctcctaagtagctggaactacagctgtgcgccaccagatcttgctgtgttgcccaggctcgtcttgaactctgggctcaagcagtcctcctccctcgacctcccaaagtgctgggattacaggcgtgagctgccttgctcagcctcagcacctcttaaaaaggagttaatttcaagagttattcaaagtgcaggaaatttaagaatgaatgaataatcgttatccataagcaattattttaaacttcaaattataagagtactatgagggttttgttcgttttgcttagtatttgaaattgtacatatttccatatattttctggccataacctgtacaagtatttgtattttctctgagtttcaagccttctctttggaaaagggaaccctgacttagagtgccctgtgattttttttttcaacctgtgtacatttaaaactatagattatagccatctgtttttaaaatagactgacaggactataaatacatttttctttctgttgtattgcttgtcttaaaaataacttatacccttccttttctccttcttacccccaaccaaaaaaaaaaaaaaaaaaaaaaccctaaatagaagctccatccccaaattatctttttagttaggttgtgagagaatgcttaatggggaatttttagttggaatgcaaatcgttcacatttgactacttttccattaaaataggtgaagaaatattgctcacagttttcctcccttcaacagtcagtggttgcacttttgccctttttgtttttcttttcacttgaagacagtatgtagtaaatggcgagactgcatgccttgaaaccaggcaccagggtttcattctggctctgctactttttgaataagtaaataaatgatgctgaaagtttggttcctcattggtaaaatggaaccatcttgcaggattaataagtacctagcacagtgcctggcacacagtagaagctcaaatgttagttgctagttttattatagctgttgtttaccatttaaatttttttttctggagttttttttttgtttttttttttaagatagggtcgcatgccttctcttgtccaggctggagtgcagtggtgccatcatagctcactgcagcctctatctcccgggctcaagtgatcctcccaccgcagcctcccaagtagctaggactccaggaatgcaccaccatgcccggctacttttttgttgttgctaattttaatacagatgaggtcttcctgtgctgcccaggctggtcttgaactcctgagctcaagtgttcctcttgccttggcctcccaaagtgctgggagtacaagccatgagcccaccacacctgtccatctttcttcctctgtggacttctgtggagtccttaccatgtgctagttacagttctaagagtttaacctgaattgattcgtgtaacctcaacactctgtttacagatgaagaaattgaagcacagaaagattaattttcccaaagtcatacagccattaagtggcaccagtagagttaaaatcttgacagtctggtttgaaagtctgcactcttcactagtgaatcatattatattgcctctgtacaggtagaaggaaagagatagagctactcctacctagattcctattctgactttcctggagtagaactttgtttctaggtgaaagtctgctctgggagttgtaggtaggctcattggctgaattgatttttcctgcacttttgacttcggacctgtagtctattggagggccttttgtgagtgagtgattttggatattggtaacgttttgctatgtctgctgaataccgtgtattatgtatggaaagtatgatcttctaaagttaaaactagctcttctaaatttcagatgaagttaaactgtcaatatgataattacataacaacatacagagcttttagtgagaattataggtgatcgtaaaagtgttttgattttgaaagcattgacttttgtgagctagattcatcaaatcctgagataacaagaattgagttagaaaattaattcctttaaaaatataaaggcctaagtgtctgtttctgaagttcaggctgaaatataaacttaaggatgagaaggtgaaaattcaagataatggaaataataaaatggatcttatttttttgctgttaaaaaatcacttattaaaattacttctattttgcaattgttaggacttagttgactagaaagtcattttccatgtttatttttccttggggaaatacttttaatgggaaggctttttaaactttattattttttcttcagataaactattatttaaaatgtgattcttaaatttcttttcttttcttttttttggggggttaagatttcgctctgtcacccaggctgtagtgcagcggcgctatcatagctcactgcagccttgaactcttgggctcaagtgatcctcatcttcccacctcagcctcccatgtagctaggactataggtgtgcgctacaacaaccagctaattaaaaaaaatttttgtagcgacagtctcattgtgttacccaggccagactagtcttgaactcctggcctcaaatagtcccactgcctccgcctcccaaagtgctggattacaggcgtgagttactgcacctggctgattctcttaattcttgaatttcttgagtgaaaaaaataatgcaaatatgctagatttaagaataaaacaatatgtgttgataacttggcatgttatattttggaaagatgaacaaataaattcattttactgttcagattatgacagtatttctaattttggtaatctttgataccgttgtaattagctttctgttacaagagatagcatttctcctcccccctgctttttttgctggggttaaaaagcaaaatatattctgttttatgcattttacagccttacaactattgcatttctttgaaaacttgataatacctaggtagttttaacattggaatactgaagattatattgcctgatcttatttaattattactctagtttattccctttaaataagtatttaaataaatggcatatattacatttgagtgctgaatcattgtagctgtcacatggttttgctcttgggaagttccccactgggtttgtagtagaaacagagaaaaaatccatctgttttttcttccacctcaattttctatccaccctctcatcccctataaaatcattcttctctggttagtcacctttttctcttccttgtgttgataaaaatttaaatctttagtgccatactgtcaaaatcagaacactgcctggtacacctttgtggcttaggaaaaggggatgggagtgttacagctcccctaaattggtcaggtatactccagctttattctaggatagcctttgagactacagaattgaattcccttagtagggaatcaaatgttacaatgtattctaggaacagagagctgacagagaagtggtaagagtgcattgtaagtgtaagaagtggagggtacttatcagactttataggaatgggattgtcaatatcacttggcttagctggagtccgtactgtcagttcttggcctggtagaactcagtagcctttatggtgttggaagtgggtaggtacaccctgtttcttcaaatatgttgatattgccctatatagtggaaatttataccaaaccagttaaaatagtttacatttggcctggcgcggtggctcatgcctgtaatcccagaactttgggaggctgaggcggttggatcacctgaggtcaggagttcaagaccagcctaggcaacatggcaaaaccccatctctactaaaaatacaaaaatcagctgggcgcagcagtgcgtgcctgtaatcccagctactcgggaggctgaggcaggagaatcgcttgagcctgggagatggaggttgcagtgagctgagatggtgccactgcatttctgcctggcaacagagcgagactccgtctcaaaaaaaaaaaaagtttacatttatatatatatatcatttattacataaacatttttcaaataagatatgacatggaattaattcatttgtataattttgtttttagttggtgtgggtaagacagttttttatctttgtttccctggtcttctattatcttactttttgataggaatagtatagtagaatgaatagttctttttggcttgtagaaatgacttaagctatgatttttccttcctcccttcaacaaaggtgattgaccctgcagggaacagagcactggatttaaaactatatgataaaaccccagacaaatctgattgttttgccacttccaacttttaggaggatgggggaaaagttatgccaatatgttatatcaggtttaattaaaaagtaatttccaggccaggcacagtggctcactcctgtagtcccagcactttgggaggctgaggcaggtagattgcttgagcccgggcgtttgagaccagcctgggcaacatagcgagaccctgtctctaaaaaaacaaaaaaacctacgtaatttccaggatatggtctgtggttggtgtacttgcaggttaatctccaacacttcctgcaccattgtgcagtggtcactgacagtcacagtgatcctttggtactttactttgttcctcagaggaggattaaaacatgttagggtactctgtcactcaagggagaaaggtatactgagttttaaaataaatttcagtaacaaaagttggaatcaaaatggtttccttgttaactttcatttaagcaaaattaggacagttctcttccttggcatttgatttcattgtgagtttgttgtcattgaacagtaaatctcaaggaggagatagttttcaaaagggaagaatcctagacacttgagggatgtgttttgcaatgggatatgacttatctgatgtgcagatgttgtagagttactagtgaagtagcagaagagtagtgaatttatagtttcttaattttagtggagtacagaggttgagattttaatctgtaatcctaacagtaacatatttacaaagagaggagtgtggctgacatcagattctagagcatagatatttttcatattgcaagaaaaagggaaatagggctagttttcatatttgattttgcatagtcttgtttttactgtgatcggtagaagtatgttgtaaaatctcaaaagctatgtaaatatgtacagcaagcagtatgatttatggaaagattactcagattcatgagacctctttgttcttgtctcatttctactaataacaacctgagtgatttttttgaacaaatgccttaaccttctggttaaggttctctgatctgtctaatctggaagttgatgtttacgatctgtctgtttgggccagatgagggaatctggggctctcaaatgtgttgcttaaaccacagaaaatatatatatatatatatatatatatatatagtttttttgtttgtttgtttggaggtgaagcctcgctcttgtcccccaggctggagtgtgatgatgtgatcttggctcactgcaacctctgcctcccgggttcaagcagttcttctgcctcagcctcccgagtagctgggattacaggcacctgccaccatgcctggctaatttttgtatttttagtagagacggggtttcaccatgttgggcaggctggtcttgaactcctgacttcaggtgatcctcccgcctgggcctcccaaggtgctgggattacaggcgtgagccactgtgcccagccaaccacagaatattgtgtctattcatgagtacctcaagttttccctcttcatttacaatagtagcttaggaagaacccaagtattttgctagaagatggtattggagcttgggaggaggaagagtaacagtggtgaggctgcagttgctaggaggccggcttgggtgagagggaagggagaacatggtctttgatactgggagagagtatcctgccttcttttcctgtgggtttaggtcagatgagaaatgaatccttgacaatgtgcagcaagtgagaagaggtgattatctcttcacctcttcccctctctgagaagaagtagaagggctgtttggagagaccaagggtctctgctaggctctggctaagggaatgaagtgattctttcaggggaaaaagaaaaaaaaattattttgataggatatgaggaaattttgttgataattttcttggttcctggatacaactaggagaaatgtcgaatactcctattttattgctttctcctatttggtaaaaacagcaagaaaacaaggtaggtggtgttggggagggaggatcccccctcttcccacgccatatcctttatagtgggtattaggactgcagtaaacacctgttaatctcatggttccccaggggcatttgctgactgggcagatcatgtcatcttcttccctgcgtctgatcatgtcaccttcttccccgtgtctgcttgtgcatccatctcagagcactgtgcttggtcggggtttggagggtagcgcggcttcccttctgcagcctttctgtatgctctcaggacccactgtaggagaaacgctgggtggttgagcttccttcgcttctgtcctatttctcttccaaaactgtaccatattttctgtttcatattttttaaaagttagcctttctgatgaataatagatcaaaaataaatcttaagctaaaatgttttaatgttttgtgaggaaaaagtattactaagaatgtttagttagccatatagaaatatttagtcttatgtgattttacatagagtttcagtttattttctggtttcaatagaacaagttgaaatcatcgcagaaggataaagttcgtcagtttatgatcttcacacaatctagtgaaaaaacagcagtaagttgtctttctcaaaatgactggaagttagatgttgcaacagataattttttccaaaatcctgaactttatatacgagagagtgtaaaaggatcattggacaggaagaagttagaacagctgtacaatagatacaaaggtgagtgcttgcttgtgactttaagtaaattttggaccagattttccaaagagatgggcttatgagaaatgaaatactatatataacttaaattgggtggatgtgtccaatagaggtctgtagatcttagagttatttcaagaggtctgaggaaaaattattttcttttcactaaaatttcttcttggcctctttattttcctcccccattgtgcaagttgagaatggggatggggaactgttttttctgccctcatatgtataaaactcagctgaaccagtctaaggaaacctgcatactgaatctttaaagaattataaagtaatgcatacttttaaaaaagttcaactgcataataggtgaataagaaaaggttaatagtttgtcttttcttattcattctcctgagtaaccagtgctgtggatccttccatatcttttatgtttatgcagaaatatatttacagagtttctttcaaagtttttctgaaaatgggatatttattttatgcataacttgtgctccaaagtcaaattatgttcatgttttttattgctggaaatattgccagattacttttagaaaggtgttagcaaggctgggcgtggtggctcacacctgtaatcccagcactttgggaggccgaggtggtcagatcacaaggtcaggagttcaagaccagtctgtccaatatggtaaaaccctgtctctactaaaaatacaaaaattagctgggcgtggtggcgtgtgcctgtagtccccgctactcaggaggctgaggcagaagaatcacttgaacctgggaggcagaggttacagtgagctaagatcatgccactgcactccagcctgggtgacagagtgagactccgtctcaaaaaaaaaaaaaaaaaaaaaaagaaaggtgttagtaaatcatatttgatagcagtctatgagtgcctctttctctttgtttttgttatttaaaatttttgcctctctgataagtatagatttttttctttaaacaagagatatttacattgttgagattagggttgaattgcatagtttaggtcacagtttttctgatactcttaagaagtaattgttgtggtaaaatgaactttgttctaagaaaaaaagaatttctgttcagaatgcctacctaagcaaaatatggatatcttgaattagaatcccatgtccctatatacgaatgtctgattttctgaatgtgtataagtatgggacatatttcacatgaataaatgagactttaaaaaatcatgtctcatctgcatatatctctacactttaagaatgctgttagtaaggagaatggctttaaataatgggaaagtgtatgttagagtaatatcgtttcatgccttccatatattgtggtcatttaaaaaatggcatataaagcattacctttttcagttttcataatgtagcataatatgacactactttaatattgcattgttatttttaaagaccctcaagatgagaataaaattggaatagatggcatacagcagttctgtgatgacctggcactcgatccagccagcattagtgtgttgattattgcgtggaagttcagagcagcaacacagtgcgagttctccaaacaggagttcatggatggcatgacagaattagggtgagtatataattacaataggaaattagatatgttactgtggaactgaattatgtcatgaactttttagtgtaaatttaaagatttgctggcccacaaacattggtataaatagaaatgggttaacttgctagtttccatgttatacagttttttgggtttgtcaagttatttatatagttagtacagcctattctatttggctatattcttatcatttacttctaaggcaggttcattagtattaaaattatgcattaatatttactatggaaaagtgaaatgaccaagttttaaagttatttcctaatgtgagactttgaaccctgcatttataaaatcctagaatttaaaaactggaagatgccttagaagttactacttgtttcacttaacactttgacagctgattagctgaatgtctttggataaattgattgaaaagtcatgggtagaggttttacctgtgacctctagttgtccatatttaatgaggttgcagacagaagtaatcagtctgttggtaggtaacaagctgccctttctgttttttagtgggccactattgaatagtaatagctaacatttattgaacattattttatttcagttaactgtgctaagtacttctcctacctcttcacagcaactttttgagaatagttttctatccccattttagagatgaagaaattgaggtacagagaaattatagaattaggtagtattagagtcatgattcgagtctgagtgacattgcagtcagtcagcgtccagtcaagatacaaaaaccacaccaggggctaggcgcggtggctcatgcctgtagttccagcactttgggaggccgaggtgggtggatcaccttagtttgggagtttgagaccagcttgaccaacatggagaaaccccgtctctacaaaaaatacaaaattagctgggcatagtggcacatgcctgtaatcccagctacttgggaggctgaggcaggagaatcgcttgaacccgggaggcggaggttgtggtgagccgagatcacgccattgcactccagcctgggcagcaagagcaatactccatctcaaaaacaacaacaacaaaacaaaaaccacacctgtaattttaacagagaaaatttaaagacttgctttactctgtcaaagggataaaaggaaactccaaggcataacaggtagcagttgcagtaagctgctaccacctctgggaagtaagggaagggaacagacaaggaagaaatttagaagcttaggagatccccacaaggctgagattcagatctggggtttggggggagagggtgtggccagctgtgatgctggtgaaaaaactgcctggagaccacttgctgcaggctgtgagattgctaccactagtggatactgctgggaccttcccacacactaaaacccttgccctctggtgaaaacaaactgggataagaaaagttccttcttcctcttccagcctttcattggctcttggtagaacctaacacagagccagctggcaagaaaaatgaagtctcacagtttgcagtccaatatcacaaagtagggcaaagaaggataggtttaaagctgagaggcagtaaattaactggcctggacactatgtccttcagccaaagccaggcccatcctgaacttgctgggattttctgtgctaggacaggtttcatcagaacttaaggaagcaatgtttttaaacatttgaaactgaattcatgtaatatgtaatgaactttcaaatcaaaattttaatttacaaactaatgatctggaaggtgttacaaagaatgtagaaggaaaatgaaagcaaaaaacgattagaaggaaaaaaattgaattgatttgtttgtggaatctataagaaatagggtatttctaccataaggctctatgaggaaagtaaggcttggtacttagagcttttcaaactcttcgaaagttgaatgttttgcacatacagaaaaagcttaatattaatttgagatgattcagttggaggtggtaggaggttcacctgtttactcctgtactgtgtatataacaagaagcaagttttcagaaggaatgtttcctcataagcaagagaccatacttttagttaatttagatagtagacgcgattaattactgtgtcagtagtgtctaatacagtttaaaatgattgttatgctgattactatacattcttatttatccactgaagctgacttctactagtgaaagtgttgatagtctagtgaattatgtaattaaaacgaatagcctgtttcttttaaaagtaattatttagaacatttaatcactctagacctcttcttcccgcagctaacccccatgcgtgtttatatttatgtaatataaaaagactgaattcgaactatttgatttttaaaaaagtagttctaggaaataaatgtaagccctcatgggaataagtaagttattaatttatagtgaaacagttaatcttttataaacttaattttacgacgcagatgtgacagcatagaaaaactaaaggcccagatacccaagatggaacaagaattgaaagaaccaggacgatttaaggatttttaccagtttacttttaattttgcaaagaatccaggacaaaaaggattaggtaagaatttttaaaaattatatttggtgtttcagatatattcaaatacattgacagtgtcgtttttgtaatagaaagttatgtgttttgagcataaagtcatgaaaataccagttattgaaaagtaattagaaacaggaaatttttaatcagaaaataccatgcacattgagtaagtttaccctgggtactatatgtgaaccactgacttttgctttatgaaaactacagtcaatatagaagatagttgttaaaattccactgacagttatttatttatgcattcatccattcattcattttttcattcatgaccctgaagatattttaggatcttaggatctatagaaatagcactataagatttctgagtcatagaatgccagataaatttattcttttttgttatgatttatttgaaaactataaggatgaaaaatgaagtgcttatcattcatagtcttattatccagaaataaccactgtaaaagtttagatcaatccatttgtatttgtacatttgcttttgggatagttaaggggatatgagagtaaaagatacagtgtaatttgcaaattacctaaaaagattagatagtgctagtaggtaattacaaaataataaaagtatgtaagggttttagagggagaaatgagtaaaagcaggagtggttgggaaatgcttcctggacaaggtgggatatgaactaaaggatttggtatttggctgaacgagggaagataaaagatgttccagtgagaagatagttatgaatgaaggtctaaaatttcagcaataagcttggctttgtgcaggagagaagttgttggtttgattttaatgagaatgcttgtttggagatgaaattggtgagacacaagaaagctgaataaccacaggcttcttttgaaatcagaaaggattttgtttttatttttttttttggagacagaaaggtttaaattggaatttgtgggaaatggggacccaatgaagattttgatgatggtgataacttccatttaatgtgagcttttagtatgtctggcactgtgctaagtactgtactttacatatactacttgtcttgtatgtaagtccattttgtgttgctataacagaatacctgagactgggtaacttacaaagaggtttgtttagctcatgattctgcaggctaggagtggggcatggccctggcttctgcagagggcttttatgctgcatcatcacgtggcagacaaggtcaaaggggaagtggactcctgtgaggagagagaccaaacaggaggggaagcctcgctttataataacacactccaggaactaatccattccctctggcaagaactcactgttgcaaaaggagaatagcaccaagccattcatgagggatccacccccatgagttaaatgctgcccaccaggcctcatcttccagctccaccacagtggggataaaatttcagtacgagttttggtggaacaaaccaactatatccaaaccatagcactgcctcatttaatgtttaccaattttttgagtgattcatcctttcattcagtaatttaccacctgctatgtgccgtgccaaatacatagtaataaagtgctagcagtttattatccttaatttgaagatgaggaaatttaggcacaggaaggttaagtaacttacccagtgaaggtaaatgaggtttttttttttttttttttttttttggtttttgaagatatagtagttggagaggctaataaggggccttctgcactaattccactttattttttaaattggggggaaaaagtattgagaaacagattatatgaacggattagattgaggaagtgacggaaaggtagagaggaagggataaatgtataacctttgtaatgtggtatggccccacgagttactaaacatgactgaattgatgaaagattcataacatatttgtaaagcgaaattctcaataataaagcctcctttccaacttgattgctcaatatagataggattttattcttaaaggaaaaatcctcattttgcaggcagaataagccgggatacctacaattagtttttctgtctggggccaccagttaactgggatgttttttctgtttttctctttccttccacaaataataatctgttaaagtctttgaatttacatgtatgtgtaaaataattattttgtcatatttagaagtgtagtacaatattttgataagattaaatataatgtgaatgtcaaatgttgatttaaagggacataacctatttcttagttatatcgctaccctttactggagcacaaaataaatggtgttttgggtgaatatatagttttgagactgaatcttagtttttattacttgtggtaagaattgagcaaaattaaatttttataactattggatatattaatatggtaaattggaattttagattacaggaaaaaattgagaaacagattatgtgaaagcattatgttgaagaattatgtgtgtttattctgttatctaataagtattgtgcttaagaaaaaatgtaatatttaaaggatgtagagtttttgtttcataagatgagcattctgaagatcgatggcacagcaatgtgaatgtacttcacactgaactgcacccttcaaaaagattcagatgataaactttatgttatatgtatttaactacaatgaaaatgttatttaagacccccccacagccatacagtgtacaatacaaagaatgaactctaatgtagaatatggaccttagtcaataataatatattcatattgattcatcagttataaaaaatataccacactaaagcaagatgttaaaaatagtaggaactgactagggaagagggtatatggaaatctctactttctgctcaacttttcataaacctaaaactaaaaaagtctattaattaaaaaaaagaaaaatgtagtaagagacaaatcatagtttttttttttggtttgttttgctttggtgttaggtatcaggaaatgtaatgacttgcttatttgcagagtttaattaaaaaggaaacagttttttataacagcctttctaagggttcacagtgctcttaaattacaagatttggcagagaggaattagaagatcataggagaagaggtaaggcccaaaacaaattggcagagagtgagtgacaaccctgtggtttgtttataaatagctgtgctaattaaaatgagaactggtgtattccatgtttctgttttttttttttttttttttttttgatgcagggtcttgctctgttgcccaggctggaatgcagtggtgcaatcgtggctcactgcaggcttgacttcctgggctcaagtgatcctcctgcctccgcctcccgagtagctggaactatatagggaagcaccaccatgccaggctaattttttaatttcttgtggagctggagacttgcggtattacccagcctggttattttttcactttttataaccttacttcttgtgataccaggatagggtgcttcctctgttgccatctgctttagtaatctgacttaaacatttttttttgatttgttttagatacaggatctggctctcttgcctaggttggactgtagtgccatgatcgtagctcactgcagtctcaaactcctaggctcaagtgatcctcctgcctctgcctccggagtagccagactacaggcgtgtgccaccatgcctggctaatttttacattttttgtagagataaggactcaccgtgttgcccaggctggcctcaacctcctggcctcaagtgatcaccccgccttggcctcccaaagtcttgggattacaggcatgagccaccacacccagcctgccattttctgataattgcctgaatcttaaaatttgaaaaggatttcataagtcctctataaaatttaacctacccaaagtagcatccttacctgatgctcattcagtttctccttttgaacatgcagggactggacacacattgttttaggaagttgtccattcctatcacagaatatccttacttgttattacacagttcttccttattaagctaacatctttgtctttattacttctatcattgctcttacttgtcccccagtgcaacactgataaaggctaaaattaaagatccactctcagttacctgttgtttttctccaggccagcattccaattattttaactattcttcttacaggagacatttgttattcccactactatccccccaaacacatttccaatttctttcaaaatagagcccataaagttgaacatcatatttcaaaaggagcctaagtaatatagaacaccgtgggtctgttaatttttgtgagactattcattatgttaatttgatcaaagattatatatgttctttagcagccatatcatttttagggccatactgaacttttattagactaaagtctatgagtcactttcttgtaggttgtggttcagctggaatcttatacctctacaattgatttaaatgatttgaacattatttgttaaatatttagtttaatatttaggaacaattgtatagtgttttaaagaacacgataatctgtataatcccatttggttctcataacaacccctttgagctaagtaaaagcatattatcttctccatcatatagatgaggaaactcatagccagagagactgacttgttaataaggtcgcctaactggagagtggttggactggcactgagactagatctcaggccttatgactccacattctgtgttttattgttgttgttgttgttattttgtgttagccgtagatatttctaagtaaattaagacattgtggcttttgcctgctcccagtgaggggtgattggggttttggtgatgagctcccagaaaggcaacgtgcctcattccaggcctcagaagcaccagaatatatttagcttcaaaaatgacaagttcaactgggcatggtggctcacgcctataatcctagcactttggaggctgaggtgggtggatcacttgtggtcaggcgttcgagaccggccttaccaacatggtgaaactctatctctactaaaaataaaaaattagccaggcatggtggtgcctgcctgtaatcccagctacccggggggctgaggcaggagaatggcttaaacccgggagtcagaggttgcagtgagctgagattgtgccactgtactccagcctgggcgacagagcaagactctgcctcaaaaaaaaaaaaaaaaagtttgataagcatgtttagaccaagaaaagtaacacaaaaccatggtgcggctgggcgcggtggctcacgcctgtaatcccagcactttgggaggccaaggcaggtggatctcctgaggtcaggagttggagaccagcctgaccaacatggtgaaaccctgtttctactaaaaatacaaaaattagccaggtgtggtggtgggtgcctgtaatcccagctactcgggaggctgaggcaggttcacttgaacttgggaggtggaggttgcagtgagccgagatcgcaccactgcactccagcctgggtgacagagcgagactcagtctcaaaaaaaaaaaccctcctgatggagtatgtcagcgctgtaaagaagttcttgagtggcatgtaaaatatagcaaatacaaaccattatccaacctaaaaaatgtgttaaatgtttacaaaagacagtggaggattcttatctcataacgtgtagaccatgtgcctatgaacttgaagtttgcgcaaaatgtgggaagaagaagacattgctattctgttcaataaagaaccaggaaaaacagagaatattgaaaataatctaagttccaaccatagaagaagctgcagaagaagtgaagaaagtgatgatgatttggattttgatattggtttagaaaacacaggaggagaccctcaagtgaattaatattactgtattaaaagtcagtttaaattagccgggtgtggtggcgcatgcctgtaatcctagctactcggaaggctgaggcaggagaatcccttgaaccctggaggcagaggttgcagtgagccgagatcgcaccattgcactccattttggacagcaagagcgaggctcagtctcaaaaaaaaaaaaaagtcaatttaagaatgtgaaattctgaccaacttctgactatttcacaaaagatactgtgaaatcctaatgaggaaatcagaaaaacctttagaaaagtagacaaattttagacacgaacaatataaattgtgtatgatgtattatctaataccaaactaaaccagattcagaattgatggttgtataagaaaggaaccacctcatgtaaaaataaaatgacattattatattgctagcctcaaaaattggtcctcagtaagtgccttttggtaaatgatctcaagtaaatgactcatagcaaaagcctcatacttatgtttgcatgttaaaaagcagaagcagcattctcaaatactaatgtttaacaagtgtatggcgatttttatttgtatttttatatacctcatcacattgtttttaccttttttctcgtgaaatgtgcacacagaaaaaaatgcatagaatttatatagataatttaataaatataaagaaaagttcatgcatttatacagccaggtgaagaaactgccggcatcagaagatcccagcaaggctctcgttcagcaaaagctcatctttcttcccagagttggaaattattctgaattttgataattatagtcttaattcttttactacccatgtttctgttcctaaacgatataaattagctttgtctggttttttaactttcctctttttgttttgaaaaatatcaattgaaaatatcaatcagaaaaggtagcaaaatagttctgtgaacttttgcgtattcttcacctggattcccaattgttaacattttaccacgttttctttatatctcagtagatggatgtacacacatattttatttgctgaaccatttgaaaatgtgcactggttttgaactttgtatgaacagacttatactatatatgttattttatatctcttttttcattgttataaaatttgttgagattgattaaaaaagacattgtgaataggatttttaatcaccattccatcctccccagtgagctggcaacattttgtttcttttagggactgtgattgggtctagtctcaattcatttccatgttcatcctgcattcagctgatcatctgttgtgaaataccacattattcttgttgattctctttgaaagaataacatggggagtatctctgtttgcattttacattttaccgtaaggacttaaggatttattctgcaaggatctcaattttatgcaatagcttgttattaggacttagttatttctttttctctatatttgccttccatttattttaactgctgttgcttcttgttaccttatcactgactttgttgtcttttccaatactgcttcagaatctaatagttctaaatgatttaaaataatgataatagtaagaactgatatgttatttaccaggtactgttacgaatgctttgttatgtattaactcatttagtccttagaacaaccaggtaaggataggtactattgttatcttcattttaaactgaatcaaggagaagtcagcccagttgcccaaggtcacttaactggtggtagagtaggggtttaagagactaaaactcatactgtaaactactatgttaaatcacctctcgctagctaagctgctctcttcatcacttataaatttctttctgagggcttcttttcctatacctgtgacaattaacattttatccttgtttaatcttatgtatttcagctcttagttataacttattaatctttttgagttaaagtcttccttttttattcaaaaacacttgactgctttcactgagagcatggagtcaagagcatctttagtctgtctggggtagtttgcagtaccttcaaaaagggtatagtttttgagccttgaagaatgaatgcacattttcaagaccaaaggaaaaaagaagccatttcaggttgaggggttagcatgttcacttgctcagaggtgaaagaacattccacctttgaggaactgcaagtgagttcatttgacaagaagtgcaaattttatctaaaggtaattggaaatgattgaagaattttaacatggaagtgacaccagattcatgcctgaaaggtcgatctcaaagcactgtggtcctttgaaaggagtgaaagctgaactagaagagagattggttatggagctatcccagtgatttagttagaaatgaggaatatcctaacataagccttcccagtggggatggagaagagatagatttaaaaggtactttggttggttgtgtatgatgaggaaggaaggagcctttctcagggattatcaacactttcaggagacatctggggaacctgtggggtttttgtcgtaatgacctaaggtttctactggccatgggaagggggtgcagggtggtggggatgggggtggtgctaatgagaagtgttccattgagaaatactatagtgggtggtgacatagaaggaagagcaggtctatagaggtaagatagagttcagtttgagccctcctgagttgaagttgttcgtggataccaagttggaagatgtcttcaggcagttagatatctgagtctagaatatagagataggtttcagatttaggagctgttaggggcggttgaatgtataacatgaaaaatgatataggtttgaaaatctgagggaggttggaaaagtggttattgttgacacacgttgttacaaaacaccaacatgtaatggacgaatggaggaagaggagccccaggaaaagaaagtgagaagcctagattgaatggaggaaaatcagtagagtgcttatcattgaagctgaaggaagtgacagttctatcaggaggtatgctcagttctctaagataaggcagagaggacataagagtattcatttagtaaccagagggtctgatgacccttcagagtttaatttcattggagtggatgacaggtagacattggttaacaggattagaatgtgtgggaaatggggaaaccgggcaatgagtgtagactataagaaattcccttcttttggacgtgcgtggtggctcacacctgtaatcccagcactttgagaagccgaggtgggcggatcacctgaggtcagaagttcgagaccagactgaccaacagggagaaatcctgtctttactaaaaataaaaaattagctgggcatggtggctcatgcctgtagtcccagctacttgggaggctgaggcaggagaatcacttgaacccgggaggcggaggttgtggtgagcagggatcgcaccactgcactccagcctgggcaacaagagtgaaactccgtctcaaaaaaaaaaaaaaaaagaaattatcttcttttacaacctgaactttctttcttttgtgtgtggtggtttttttttttttttttttttttttttttgggagacagggtctctctctgtcacccaggctggagtgcagtggcacaatcatgacccactgcagcctcaacctcctgggctccatcactcttcctgcctcaacctcttgagtagctgggactacaggcatgtacaaccatgctcggctggtttttttgatttttagtagagaccaagtctcactatgttgttcaggattacaacctgaacttttacttttgtcaaattcttattttggtatatcagcttgacatactggcatttataggtgccacatggttagtacttatttgaatatttcatcatcatccttattttatacaaattagttgaaaaggaaaaaaatatactagcaatatgcttagttctgataaacttaaagcatttaaagtgaagtgaattaagcacactaataacagcaaatatttagtcacaacatttttggcacttaagccagacaattgtatgttgagttggtaaagaaaagaacagaattgaacaacctggaaggaatattggctttacagattttacacattgcaaagattaaaagggaagtgccattagaaattggtgttatgtatttttttttttttttttttttttttttgagacagagttttgttcttgtcacccaggctggagtgcaatggcgccatcttggctcactgcaacctttgcctcccggattcaagcgattctcctgcctcagcctcccgagtagttgggattacaagtgcccaccatcgtgccggccaatttttttgcatttttagtagagatggggtttcgccatgttggtcaggctggtctcgagctcctgaccccaggtgatccgcccaccttggcctcccaaagtgctgggattacacccgtgagccactgcgcccagccagtattatgtattttttagttctcttaaaacatgggcatcagaatttgattttcaaacaaattatgtataaaagtagaagactctgagtgctatttcaaggttacctgtgaagggaaggagaaaaagggtatagccagtaaaggtgatcaagagatccaagagagctacagagtgagaccgtgtctcaaataataataacaataataaaaacaaacctattttgattggtcaaaaaaaaagatccaagaaagatttttaaaagataagtgataacttggctgggcgcggtggctcatgcctgtaatcccagcactttggtaggctgaggcaggcggatcacaaggtcaggagatagagaccatcctggccaacgtagtgaaactccgtctctactaaaaatacaaaaattagccggtcgtggtggtgcgttcctgtaatcccagctactcaggaggctgaggcaggagaattgcttgaaccagggagtcggaggttgcagtgaaccgagattgcaccacagcactccagcctggtgacacagtgagactccatctcaaaaaaaaaagataagtgataacttgagcatgtttcttgatggagttcgaaatgccagagaacaaggtaaagttggagatgttgagaagaggggaaagcaaatcaacagacaagattccttaaagaggtaggatggtattggatttagaatagagctataaggggcttatccttggatagaagaaaggagagtttcttctgttgagtttgaaggaagatgaggatgatggatttgaaggtaagtatgtttgtatgtgaaaccataggaagtttgtcgacttagcagtttctgaatgcctactgtgtatttcagtctgctagttgaggaatatgtagtctccatcattgaagaaagttaagggtcagtcttgcaggtttccagctactgtgtgtgtatgtgggggtggggaagtaggtattgttttttatgttgttgtgttgtttgtttttaagagatgtcacctgtcacccaggctggagtgcagtggcatgatcatagcttactgcagccttgatctcctgggctcaaaggattctcccgcttcagcttcctggagtagctgggaatacaggcatgcaccaccatgaatggctaatttttaaattttttctagagatggggtcttgctatgttgcccaggctggtcttgaactcctgatctcaagcagtcttctcgcctcagcttcccagagtgatgggattacaggcatgagccactgcatgcagcctataattgatttcttacaaatcatctgtttttgacagtgaattagcatcaagtttgctcttttttgtttgtttctgagacggagtcttgttctgttgcccaggctggagtgcagtggcatgatcttggccccctgcaacctccacctcccaggttcaagaaattctcctgtctcagcctcccaagtagttgggattacaggtgcctgctaccacgcccagctaatttttttgtatttttagtagagacagggttttgctatgttggccaggctggttttgaactcctgacctcaagtgatctgcctgcctcggcctcccaaagtgctaggattacaggcgagagtcactgctcccagcctactctttgttccttgttttttttttttttgagacggagttttgcttttcttgcccagactggagtggagtggtgtgatcttggctcagtgcaacctccgccttccggtttcaagcgattctctagtctcagcctcccgagtagctgggattacaggtgcccgccactatgcccagctaatttttgtgtttttagtagcgatggggtttcaccatgttggccaggctggtcttgaactccttaccttgtgatctgcccgactcaacctcccaaagtgctgggattacaggtgtgagccaccccgcctggctctttgttgcttttaaaaattggggcagcacttgcctcaatttttgtctttcctaatcactcatgatttctcaattataaagaatggtttcgagatgtcatctatcaataaaaggacttttaagttacttaggatgtaatttttcttgtgctggagaagtaaattcactcataaaaactaaacactttcttaactgctatggttccttgaaagagatcatagttctctgtcatgtgataagtgtagttctctgtcatgtgataagtgtagttctctgttgtgtggtaagcgtagttctctgttgtgtgataagtgtagttctctgtcgtgtgataagtgtagttctctgtcgtgtggtaagtgtagctctttcttatgcggcattattgccttctctacccttctctggtccatgcccagttaaaaagtcatttatattgtctttggcaaactttaagaaattcttggtttcttattaattttaagttttagatcagtatttttaatgatctctttgtggtcaggatcagtcagtaaataatttagagcataaggttacttaggattgaagagcagtccttcaccttccaacctgtaggtgtacatcagggattctcatctgggttggccctcaggttgtctttggcaatatatggagacattttttattgtcaccagtgggggctgagtgaagctgctactggcatctagtggatggaggtcagagatattgctaaatttcctacagtacacaggacagcaccctacaacaaataattatctggcctaaaatgttggaagtgcccaggttgagaaaccctggtgtacagtaactaatatttgaacacttttgtgagctactatgtttaactgcattctctaatttaaaacacagaattcccccgtgagataagtagtatcattttttgccctaaaggccctggtcatttttgaagagggaggatacaaactttggactcatttgtataggaaatttttaatacataagtattcaggatacaagttttttatttttagactttctttggtcatacctgtttttttgtttgtttgttatttttgcagggacaaatatttatagcatttaaatacataattcatttttactatttcagatctagaaatggccattgcctactggaacttagtgcttaatggaagatttaaattcttagacttatggaataaatttttgttggtaagttcacattttctacatttctctctgttttctcaaattctgctatgtttaaagataaattaacataatgtattggatatagaatgagaaatttgattaccagaattttgttacataattgttttgcattcttgtatttcaaattgtccaaactgtttttgtgcagctctttttagtgatacaaatgtattttgtttttgttttttaaataggaacatcataaacgatcaataccaaaagacacttggaatcttcttttagacttcagtacgatgattgcagatgacatgtctaattatgatgaagaaggtaatgaaaatttttgccacaccacttttttttaatgtgcctttttatcccatacccttgaacttcttaggtacttttgtttttctcggagttggaattccctccgctgagcttttgttttgtttttgttttttttgagatagagtctcattctgttgcccagggtaggtgcattggtgcaagcatggcttattgcaagtcttcaaactcctgggctcagcagtcctcctgcctcagcctcccaaggagctaggactacaggcatgcgctgcaatgcctgactaatttcttaatgttttatagaagcaggggtcttgctctcttgtactcctggcctcaagcaatcctcctgccttggcatcccaaagtgttgggattataggcatgagccactgtgaccagctccaagctttttttaatgctcttctgaatgtatgaaataccttcatacatttaccaatccatattcttctgtttccttcaattcctactcagcattcatgtcttccagaaaggcataagtaatttttatccatgttttaggttttcagtttaggaacctttttacttcttgatgtacttttgtacttatttgtatctctttttcatctgttagtcttttgtataagcttggttgtaaattccttaagttcagtgacttttttttttttttttttttttgagatggagtcttgctctgtcacccaggctggagtgcagtggcgcagtctcagctcactgcaacctgtgcctcctgggttcaagcgattctgctgcctcagcttctcaagtaactgggatttcaggtgcctgccaccacgttcacctaattttttgtatttttagtagagacggggtttcaccatgttggccaggctggtgttgaactcctgaccttgtcatccacccgcctcggtctcccgaagtgctgggattacaggcatgagccactgcgcccagcctatttttttttgaaacttacttcagccgcctaatatagtactattggcattcagtaaataatcactgaatacttttctgctatttcttcataaatgtataaagatggtgctaccatccactactaggatgtggacttgtatttttctatatgtagaagtgatttacattgatttcttcatacatatttccctagtccacttgagaactggcaggatgcaagatggagatattttttgaaaaaccccctgtgatctcggtgtcctggaatcatttaaaagtgtcctggaatcattaaggctaatcagggatgatgttatttcttttcttcatttcgttgtcgtttataatcttccctgcaaagtgagaaatgtttaatcctgcatatacctaataattgtgtcttctggtaggttttacacaaaaatggagagctttctgacttggtgatgggcatgtgaatgtgtagaggcatgcatatatgcaattttacaccttttagtaacgtattagcatgaaataggatggaatttgacacttcctgttaatctcctttgtgagatggccacagaatgcttgaaaacttgtttctcctcctatgccttcagcactggcagcatgctatcatttcatagctgctccttaggctgccagttttttgtttgtttgtttgtttgttttgagagggagtctcgctctgtcccccaggctggagtgcagtggcgcgatctcactgcaagctccgcctcccgggttcacaccattctcctgcctcaggctgccagttttgaccaaattacttccattggctgactgcagtggccttgagaaaatcatattattgatgagttgccagacaagttacttttatcactcaaggaacaaccaaatgttggagtaataaatcacaaggaatacaaggaatatttggggtaaaaactccaaaaagtttgagttttgaaagacttaatcagtgggaatagataagaatgatatactttaacgcttatgaggaagtcttaaaaaaaggattctactaaaatgttagccttatttctgcttttttcccccttctctttctttcatattttttcttttttccaggagcatggcctgttcttattgatgactttgtggaatttgcacgccctcaaattgctgggacaaaaagtacaacagtgtagcactaaaggaaccttctagaatgtacatagtctgtacaataaatacaacagaaaattgcacagtcaatttctgctggctggactgaactgaagatcaatcctcacaattcagactgagggttgagacaaaactttaaggatacatcttggaccatatcgtatttcattcttctaatggtggtttgggcttgtcttctagtctgggccgctctaaacatttataattccaacattgtggatttcatcttatatctgtggaccatcctagtttattctcccataagtcttagaagctttatggtgattattttgaggttttcattctcgcataaagcacaatgctgtcttcatcagaaaacagttggcataagaattaaacatatgaacatcacaaaacaatttataaaaacttcttaaatatacgctttgggctagttgcaaagactatgctaatagcacttccagtgagagtgatatatttaagtgtactggatctggaatggtgttttggtttggggggaattttttttttttcctggcaaatcacatgtgttgttgatgtgagtatctgatgaaaaaacaatgtcagaataaccgacatgaaaattttttaggataacttggtgcctacctgaaaaatgtattgtgttttagactcttgatttcaaaaggttccacagaactagtctgcgcttaccttacccatgtttatatatagctgtcctacagggagcttttatttagaaaatgtctgcataatgttagattcttctcctgtctacattatgcactacataattggacttcattatgcttttgaaatgcttatctgcctgtcacataagttaaactatttaatttgttttgaatgttttggattgctacacaatacaatattctaaatttaggcatgagggtttttttgttttgtttttactttttttttgtcatcgcactatggaacacaaatggaattctcttaatttataagaagatagttgcagttaaattttgaaaatggttgtaatgagccatgaagttcaatctttataatataggtactgctctttcagacaaatagtccattttcgatgacttattattttgttgaaattgctttaactgctaatcactgtggttgccaaatatttacttcaggagcaaagattttcaaacaagcatacacgatgcaaaataccaatctggcttctagtctctttactgttttcgtttcactcagattagctcagttttctcatcaaagcagaatgctatcttgtatgtatttttttcattacaagccccatgagctgcttttatgctgaaaatggtcatttccctgttcacttactgacatgtgaagaagggtttcttgctttcttaaacatttccgtaaggcaggctagaaatgtaatacttcaaatgtttgatgattatggtcttttgataggaatagattctgcttgggatatatatccaggcactctctaaggtctagggttgatattaacaaaggaatgtacttagaatagcagtacattttatgcaaatatggaaattattttaagaaacaatgacatatcaaaactgctttttacatgattttgaaatagactagaaagctttccctatagacatattaatattccaatcataactttaattcaagaatgcagttttaccaaaagaaaaatttgaaaatttctattcaggctactggaattggttattaaaagaaaaaggaaaaagaagaatcttgctgctttcagtatttcctgatttttttgtaaatataaagaggaacttcaattatgaaaaatttttaaaagatatatatatctatatatctatatatatgtactgttttgtttcctgtcttgaagattttgagttatggttattggtttcagattgattaattcacatatgctgtgttttgaaatgagatcccattagcttttttttttttttttttttttcaatataaagtgttttctttaaaagtcatattggttcgtggcctagtgccttggattttacatatttttctttttaaatgcaaaaccttttcaacaaaatagtgtttgtcatcaggttggtactaaacatttataattactgtgtaattataaacaaaaatacataaagctttgaatataattatgtagcataaaagttaaggttgttcactatgatggcatcttagaattaaacaaaacttttactagggctgaaaagagaagactgatttaatgtggtgtgattattctgaagataaatgtctggctacagggaatattttgtactaaaaaatgattacaca

SEQ ID NO: 15 - DNA, 140234 bp, Homo sapiens
gcggaaggggctggggttgcggcgcggcggcgaggaccagaccgggggcggggccggtagtgggagtgcggggcgcgcggtgacagcgcggggttggcggcgtgggacccagggggcgacagaggcagcagcagcccgaggcctgaggagaggagaccggcggcggcggcaatgctggagacccttcgcgagcggctgctgagcgtgcagcaggatttcacctccgggtgggtatacggtgggcgacgaaaagggacctgagggggccgggccgccgcctgggatgcccctgcctcgctcccttccccgcgccacggtccagggtccgtcctgtcccgcacctccccgccccgccccgccgaggaaagtaacgaacttcccggcgtcctcgcgtcgggcggcgcaaagtaacttaggtccctgcgggccgcctgtgacgcgcaccccccaggaccgggaggcgctcggcggcgcagcggagcgcccggggggggtgtgggaccctgcggtcctttcccggcagcatcagctgggccctggagggaagtcatgtgagaagccagcgcgcctcaccgcttccgcccccgcggcacagtggcctgcgcccctcggcccagcagacacctgctcgtgcgcacctggagctgggccagccaccctccccgagtcggatcgcaccgcgcagcagcctgcaccctccggccacagccttccgcgccgcgtctcggctttcacgcccggctcgccggcctaacccttggcaaggctggccgcccctccccgttgcgtcctttctctacctttgccgtgagctcagcgcctcggcgaaggaactcctaagcaggagaagcgacagaactttaggaatgcttttaatacccagcggttcccaaactttgcttagaatcacctgggaacctttcagagttctgatgcccaggtctcaccccctacctgttgaccagagtgcctggagacggcgttttaaagatccccaggggattccagtgggcaccaacgcctgggaaccacaggccgagactctggcgccagattgcctaggcatcctggctcgaccactaaatcaaacgtagttactcagctgccttgcctcaatgtactgtttccgctaccgtaaaatggggataatgatggtacttaaaaggttattacaaggattaatgaattaatgtgtaaaacacgaagcaagcatcatgtcagtattgttacttagtgcttaattttaattttttcattcctttaaagtgaaaaagatctgtctttgaaaaggatctttcaactttagcttacaaatcctgttggaggatgcactgaatgtgagaacatttccactcatactgttttaaatttctcccccccaccccccttttttttgagatggagtcttgctctgtcacccagactggagtgcagtggcgtgatctcggctcactgcaaccgccgcctcccggattcaagcgattctcctggctccacctcctgagtagctgggactagaggcgcccggcttatttttgtattttttagtagagacgggtttcaccatattggccaggctggtctcgaactcctgaccttgtgatcctcccgccttggcctcccaaagtgctgggattacaggcgtgtgccaccgttcccggcccaccctcccccccttttttttaaagtgacaagttctcgctctgttgcccaggctggagcgcagtggcgctattatagctcgctgcagcctccaactcctgggtacaagagatcctccctcctaggcttcctgaagtggtgggattatgggtattagtcactgcgcccagcctcgttttaaatttctaatgagaaagatgttagccaaaattttatcttaatggacaaaaatgttaatactatttgcacattgggcgttgaataacaaactgtcaaacgcttgagcacttaccatgcgtcaatcatttttgttagtttggtgtttagaaagttatggacgctcggagtcattcactgatgggtgtgcttgcgtgcttgcattttgttctccctatttagtaaaagtaccttcttttcagagcgtaaattattgtattgaaaactttttggtgtgatgctgaaatggcccatttgtagcatgagagtggccattattctcctgttagtacttcatggaattccttgatggcacaagagcccatcttgtagttactataactctaggtcacatggttgcctcagaagcattcatgctcctgacctttgtaagaaggcattttaccccggaatgtagattctggagtgggctctggactgctggggcacaaaccatcctgggagatcagggtaaccctaaacgtttagagttagttaaggagagacatgccaaagggatctagttagaaccccttggaaactgacttgacttcttaaagatgccgtagtctggggccattttggagctagacatcctgagagggcttcattaggtcttttgttggctttctcctgtacaggtcactttcagctgacaaaccactggactgtcagtgtgtgccattagcctgtcacctggtggagaaacaactcatctccaagtgatgtcagtctcccagtagacccggacctctagtgcctgatgttcactttcttcaggtcctcaatttcctacatttaagctgttcggttaaacttttccatattcagcttgagatcaacctcctttacataactgattatttttgccttgaggagaaaagatgacgctaaacacagcacacatgtgtttattatatgttggtaatgtggaattcaaagatgaaagagacgtgagctgcatcactaaaaaagaaacatattacataaatgcaatgctgatatcatagataataaaattaacactaattttttgatattatcaattatgcagtccataatcagatttgttttgtgcttagaaatgactttttacagttggtttgttcaaatccagatcagataagtttcacacattaaatctgtttaaaaaccaatttttaaaacagacgactgttaaagggccacatggggaagctttatggaatcttccaacaattttgttgtcccagctacttgggaggctgaggcaggaggatcccttgagcccaggagttcaagactgggcaacacaaagaaaccccatcttttggctgggtgcggtggctcacacctgtaatcccagcactttgggagcccgaagcaggcggatcatgaggtcaggagttcaagaccagcttggccaacgtggtgaaaccccgtctccactaaaaaatacaaaaattagctggccatggtggcgtgcgtctgtaattccagctacttggaaggctgaggcagaagaatctcttgaatccaggaggtggaggttgcagtgagccgagatcacaccactgcactccagactgggtgacagagggagactccgtctcaaaaaaaaaaaaaaagaaagaaaccccatctcttaaaaaagaaagaaaaaatgaaaaaacatggccctggccacccagagctatcacattggacctggcgtttctgtagaacacttggtggcagagcaattgtgtggaagccagagcagctgccttctaaaataattggaaacaccgggtgtgcaggctgccccagggatggaatggaaggcctcaggcatttctgggctccttcagtgcagccagtgcagctcccgctgtcgcccagagcagcatcctctcttcggagcttctgtgatcattttcactttctgaaaactcatatgaaggccctaactctagataaatttactttttttcatttttagtaaaatagaacgattccttatcagtctcagaatgtcactttggtgatgaaaccatgtccaataagaataaatttctacattccattcaaactttgaaaaagtgcagcttaagaccattgttctttaagggcagtgtagagattactggtggtttggggggagctctaggttgtccatggacttatggccttttttgtaaatttttatgcgtagtaacaattatgtcaaccttgagaaaaactagtgattacatcacattcttcctgccttaattgggtggtgggccagccttaggccacagactgaagaggattggttctgagcttcactcaaagatcttttcccctcacctaaagtgagttgtaatttgatttaactgagtcagaattcttggagccttttggagagttcacataaaatatccatttttacagagattggcttgagctctggggaagacttttggacataccaaagtacatacttcgaagccactctggtctttgacttttaccttttgagctgttacgaccaaaggcctcaggattgaggtatttaggcatgcaaacccttcagggaactgaaaatcagatttactgacgggtttacagctgcctgtcacaggctggtgtttcctatttgtgatgcactgggttcctgtggttggggataaaaaaacctgctattgttgcagctagagggtgtttccccctcaaagccctcactgcccctgccgcccacctgcacccctgcccagtgtcctcattctgtcttcttccgtccttgtagtatctaccaaaacctacacaaagggggttggagccagtcatctaaattacaatgtggtcaaatggtgaagtgttgcttgaaatgttgacttttccgggattaatcatcatcttaaagagaaaataatctcagtattcaacttgatttcataaatatctacagagttcctattaagtgccagtgccagacattagactaggcactcaaagtgtcctttttcatagaagcttaaaaaagatttgagagcccatatgctcaggtttgcctagtctttcctaaacaatgtctatatattgggccagatcctgcaggtacaaaggtgtctaaaacagtctctgtccaccagatgccctagactggtgctgatataaagcaaagcagaatgaacagaatgttaaagatacaaatagtgtggtatgtgagtccgaagaaagagtcattagttaggatgcatttacagaaggcttcaaagaggaaggggtttctaaaactaggccttgaataatgaggagaaattgcgatagatttggataagcacatttcagagatggaagcagtcctgggagatgaagctggaaaggaagtttagtgcctaataatagaatatcttcaatgctttgcttaattaatttgtcaaatatttattgagtgcttactatgtggcaggcactattttaggtactggggatatagcagagaacaaaccagatagcaagtaagatccttactctcgttctagtagcagactgtctagaatatctagacggccataagttctgtggctaaaaatcaggctaaggagaagatggcctacctgtatttctggaaaaatatttctgtgtttctggaagaataacttgagaggctgtgtgataggaagataggggatggggtagagggagattatttaggaggctgtaatgaaggtccagatgagagaagataaggcagtgctgatagaagtttaaaggagggaatagatgtgttaggcactggtcagattagacagcagtgggagatgaaaaaggtgcagaaattgagaatgtgaatttggaagtatcttagataaatggtgtcatataccagcattaaagaatttaacaataggtttgagagagaaggaacagttaacagtgaatttgtgatgagctagctgcttgacagctgagaagcaattggaaatttctcttgcgctcaggtgagaagtgagaacttgaagccatgtatttgggacttaggataaaggcattaggatgtagatagtctaaattcatctttctttcctgagtctgtgcagcttttgtgtgaatttcttaggctttgtaccttaggccatttgcacttttaagtgtgattgaggctttggcttttccctgatctcgcttaagagagaaaaaaaatgatgaacactgatgtgaaaatgtaatagattggatgtgccttatgacaaaatatgctaattcatacatttctgtggtgctttaaagcaatcgtcctcacctttcctaatagccaatgatgtagacagttggaaattgagttacaagtaaatgaaacgtcatgcaggttccgcacgctgttgaatcaccggcagatctcagcagtcattgtagtactcaatgcatcattctgtttatctacatctttttcttttctttttttctctgagacagggtctcactctgtcacccaggctgcagtgctgtggtatgctcatggctcactgcagcctcaacctcctgggttcaagcaatccacccacctcagccttccaagtagctgggactacaggcatacaccaccacgcctggctaatttgtgtatatttggaagacagggtttcgccatgttgcccaggcttatttacatccttttacactttttgtctaagcagttttgtgagtcacccccctttttcagtaagaagcccccattttagtattttctacaaagctcaaagacataaatatgctggtgtcaaattaaggtgaagtcgttggagctatctaaaaataaaattattgaactttatgacgaatttgaggtttagtgctttgaacttgaaagttgtcattagtagaaaatagttgtcagatggctcacttagtctatatattaatatgctcacacagcacttatgtgttcatggggtgtatggtacttgggagaagaccaagaatagggctgggcaagccttttgtaggcacattgggaacctctgctttatttcaccttagcccagtaatgtagtacattggtttctcggctttcttgatggggatcacctttattataactttcatttgaaattagctctgtagtttccagaatgccattaaggtcatatttggaattttattcaattctcatggcaaatctttatggttgagtataatactaccattttacatttgaggaaactggaatattccccctaggtcagtatttccttcacagcatgtcatgatattgtaggacattaaacagacgttataagtgggttgtttccaggacagaataagttctccagagaaactggagttatcctaaaataaaaatagtgggctaatttcaggtgaattctgggttttgaggatgttattttagaaaatacctttttggctttttgttactttcttaagtatatctgatcttttatatttttcatcttaagaataatagttggaaacaatcaagaaagtttagcaggcaaaaagatgactattttcaactttcctatggctactttgtttttttacttttttttttttttaacttcgttttactttcctatagctactttgttttttactttgtttttattttttagcagggaaaaagatgactatttccaactttcctatagctactttgttttctccaacagtttcttttctgcattttggcacattggccatttatttggagaagaagtggtgagaaaagatgaatacctaaaagattgtttttgttattaaaaatgttttttggctggatatggtggttcatgcttctaatcccagcacttggggaggctgaggtgggaggatagcttgagcccatgagttcaagaccagcctgggcaacatagggagacccctgtctctacaaagggtttttaaaaactagctgggtgtgctggtgtgagcctgtagtcccagctacttgagaggctaaggtgggaggatcgcttaaggccaggagcttgaggctgcagtgagctatgattgctccattgcactccagtctgggtgacacagcaagaccctgtctcaaaaaaaaaattgtattttacaaagtctcaaacacacacacaaatagaataacacaatgaaccacatatatccattgctgagattcaacagttttcagatactgccacgtttgccttgtctctccctttatttataatgtaaatctcagacttgcctactatacctgtgatatgtcagcttgcatcactaaaaaggaaacacattacataaatgcagtgctgatgtcataactaataaaattaacactaattctttgatattatcaattatgcagtccataatcagacttcttttgttcttagaaacgactttttacagttggtttgttcaaatccagatcagataagtttcacacattaaatttggttaaagaccaatttttaaaacagatgactgttaaagagccacatggggaatcttttgttgaatcttccaacaattttactttctgttccctgtaacactccttttttccctttcatttcaaaccggttttttctttttgtcggtggcggggaggagatggggtaggggggcagagaagagaattccaaacttggcatattacaattaagaaagtaaaagtttgttttagaaataaatagttgaaataccaacttagagatttgctggatcatataattagagtagtccaaagaggatcttaggaattccctttcacactcagctgtatagaattctcctgaatcactaaaaataatgcgagaatcattttgagtatgaggcactgctgtatataactaggataattttgcctgagatgttccaactaagtattttgatcaaactttatagtggaaatggtagagcatggccataaaaattgttttccctaggttttgcttaatcttggtttaaaccagatttactagtttccaggataaactgagaaatttatattagacttttacacaatttcctagacttatctagagaggtatactaattacttttgtattaaagagattgctgaatcttttgaatattgcagaggaattgatcttgtcaatattttattttttgaaaaagatcatagagtaatatgaaactctttgtatgacattggcattctaatttggttttaaaaaaatgcagtttatcagaagtccccatatggtgcttaatcagacgttatagacagaaaagatggaatcctgtttcagaaccagcatgcatagttgtgcagattgtatactgtaccatgcattagttgaggcattcatgcaagagtcaacttgtgtattaggacagtttctggctgatggcagtaaagtgtctggaggaaggagcagctatttctgtttttacaaagactttgtaggggctagcagtagtactgtggcctatattttcagtttctatttacaaatgagtacttgttgaagtgattgagaagaatgtgtacatgatatctcattttatgtgatattactgcatactgtagcactcacttattggcaacctcagttatctgtaacagagtccacagccaaaataaagtaaaactgggccagtgaagtgaaaataaattgtacagtttatgaacatcatattttacattaaaagagtctgttaattctatatatgcagctctagcccatttatctgttttccagtgcaataatttaaaagcagcaagtagaggggaggagactgctagaattaaatagctggcagaagcagtgagtgagagctgacatccaggtgaccaatggtagagaaagaaaatttaggaaaggtagacataagagcccaaacaaacacaaaactaccatagattggtttcaggttaatagatgaagatgcatttctagctcagaagtatcaggggagagtactgttttgctgcaaaatgtagtcaatgatattcttaatactgatcctgagtcatcacaaaatgttaaatgagatatacaaaatcctctttaatgaaagaagtttgtaatatattttaaaaagctttttctcaactaaaatttcaaatactgtggatgcttaaagagatttgaaggcctgggtagcatctacttaatgaagtgtgctgcttagatatctttgttacctatcgatttctcctatgtggaacattactttttctaaagatgccagataaattatgtttttgtggtctgatcacatttaggaatcttggtttctaaaaaaggggcttggggtaagtaagaatatgaaaataaggcctggcgtggtagcacacacctataatcccagctctatggggaggctgaggtgggaagatcacttgaggccaggagatagagaccagactgggcaacatagtgagaccaaaataaaagtgaaacaaatagctgggcatggtggcacatacctgtcatccttgttacccaggaggctgaggtgggaagattgcttgagcccaagagtttgaggttacagtaagctacaatcgcaccactatactctagcctgggcaacagagtgagaccatctcttaaaaaaaaatttgctacagattttccgtttgtagtatctaacatatagtaaacactcaaatatttgttgtcttttgaggtacttaattcttgcttaaaaaaaaaaaagtagcttatctgacctaaaattttaacatgtgaaaatttgtggttgaaaaatctctgggctgggtggggtggctcatgcctgtaatcccagcattttgggaggctgaggcaggaggatcatttgaggcatggggtatgagaccagcttgggcaacatagcaagactccgtctccactaaataaaaaaagaaattacccaggcgtggtggcgggtgactatagtcccagctactcaggaggatgaggtgggaggatcacttgggcccaggattgaggctgcagtgagtaatgtacatgtcactgcactccagcctggacgacagagtgagaccctgtctcaaaaaaataataataatctcttgacttgtaaaaatattatattttatattgaattataggctgaagactttaagtgacaagtcaagagaagcaaaagtgaaaagcaaacccaggtaagcttgtgctaagattttaacttaactgtgacttaaatttcatacaacttttggtgtattcacaattgtgtagttatattaatgaaccttagatttgttgagtgcatctgactacaaaataatttatcgattctttctaaattttgtaacaggaaaattttctaataaaatcgtgaaatggttgaaaaaatggtgaagtataattgttttactctgacagtcaatgagtattatttgatcacaattagtcatttttaatttgtataagagcaaaagtaaaagtcctgaattattgaaaagcaaattaatgatgaaatactacttggcaaatgagcctcttcagctatgttacctgttttgtatgaaaacaccaggattgtgctgtttgtccatttttttaataaagtaaagcatgtgaccagatttcattttcaacctagaaatgaactgtgatcttacatatttgttcttatccaacattatattaaataatttattgtatgctgaagagaatctctggggcaaaatgatggttgatagtgtgttacatacagtacattaactctgaaataaaacacatttctctaaaagtttaataattgtcattagtgattttaaaatatattacaattgacaatgtcaaaattcttgtatgtacctttttttttttttcagttggctaaatcaagaacagttttaataagtgtttcttttgggcaggactgttccatttttgccaaagtactctgctggattagaattacttagcaggtaagtgtttcatttgtagaggaaggttatacttctgacttttttactgaccaaaaatatcttttaattttgtaggttaaaagccttaaaacagctaaattttatcttaatgcagtgattggaaattatttatgtattattttccttgagggctttcacttttcactcattagtacaaagtccattcaaactttgagcagacagatcactattgtatttacaagtcaatactttatgataatatgtacggcttctttattacaagaaaattgattctggatttgagtccccaataattttgtttttttgctttgattcttatgtcatttcttttccaatccattcttttattgacatggagtttaatattaaaatgtatggtctttttagatataacatcaaaagcacaaacaacaagataaaaattagacacaatggacttggtcaaaatcaaatacttttgtgtgtcagagaacaccatcaagatagtggagtgacaaaacatagaatgtgagaaaatatttgcagatcatatatatgaggaacaacatgtatccagaatatataaagaacttttaaaacttaacaataaaaagacaaccccatgaagaaataggcaaaagagttgaatagacatttctcaaaagaagatatgcaaacgaccgataagcacatgaaaagatgctcaacgttgtcagtcttcagggaaacgcaaatcaaaaccacaatgaggccggtcgcggtggctcatacctataatcccagcactttgggaggctgaggcaggcagatcacttgaggtcaggagtttgagaccagcctggccaacttggtgaaaccctgtctcttactaaaaatacaaaaattagctgggcctggtggtgcatgcctgcaatcctagctactcggggctgaggcaggaaaatcactggagtgcaatggtgcgatctcggcaggggttgcggtgagccgagatcgtgccagtgcactccagcctgggcaacaagagcgaaactccatctcaaaaaataaataaataaatacagtatatggttaaagtatgtcattatacatatttctgtgcttactaatgtgccatttgacagatgtgtggtaaagatgtatgtgggagagggtatgctgcttttccttatctgtatttgttatgacacaatcactgatacctacattttcctttctcctttctagttcttcattaggtttctttttatggttgctaaatctagagatttttcttctctgaagtgaaaagtgcttaatatgatatttgcttcctttgttttgttgtgtgaagaacagaaatgaacatgaaaggaagtgtagtacaaattaatcagtaatgtattgtttactatttacattttatctttattttttctctagaaacttagttgaaataacttcattttactgaaaaatttatgttagagctatcaactttttgtgtggtacattttttggggatagggttgcattttaggagttaatatagaaaatttacatccgtaagacggtgtcaataatgtgtttatacatcgcactgaaacagtcttttcccattggaactaaaattgaatgtgagaaagaccattttaaatagcaaatgtttaaatcatatttttaattttaaaaatgtaatatacatagcataaaatgtatcttaaccattcttaagcttagtagtgctgagtacgttcacatggttgtgcatccaatcccaaaaactcttttcatcttgcaaaatggaaactctgtacctgttaaccaacaactctcatttctactccctcctctccatcccaggcaaccatcattctatttgctttctctgtgaatttgactattctaggaacatcatataagtgcaattataaagtacttttgtgtgtgaccggcttatttcatttagcataatgttttcaaagtttatgttgcagcatgtgtcagaattttctttctttgaaaagctgaatattctattgtaagtatgtaccatattttgtttattcatctgttgatggacacttgagttgcttccactttttggctgttctaaatactgcttgctgctaggaacatgagtgacaagtacctttttgacaccttgctttcagttcctttgggtatatacccagcagtagaattactggatcatacggtaattctgtgttttattctttctggaaacaccatactgttttccatagtgactgtatcattttactttcccatcagtattgtataaaggttctaatttcttcctatcctcaccaacgctcgctattttcttgttttttattatagctactctaatgagtatgaggattttcccctgtgttttcttctaagagtttttcttgtcaagattgttttggctgttgaaggtcatttgagatttcatatgaattttaagatgtattttctattgtttgcaaagaatgtcattggggttttgattgggattaaattgaatctggtcattttgcttattacagataacaatgttaagtattccaatccattaacatggagtgctttttctatttattgatgtcttctttaatttctttcagtattgtttagtagttttcattgtatgagtctttcatcatctttgttaattcctaagtattttttgatgctatcatttatgaaattgttttcttaattgctttttttgaattatttattggtagtatatagaaacaactgacttaattgttgtgtgttgatttaatatcatactttgctgagttcctttatcctgatagttttttgtgtggaactttcagggttttctgcatataagatcatatcatttatgaatagaaatcattttgcttcattcattccaatttgaataccttttatttcttttttcttgcctaattgctctggctagaccatccagtactgtgttgaatcgaagtggaaaaagcaggcatccttgtcttgttccttgtcttgatcctgatcttacaggaaaagctttcagtctttcaacattgagtataatgtcaactatgaatttttattatgttgagattgttcccttctactttagtgtttttatcatgaaaggatgttgaattttgtcaaataacttttctccatgaattaggatgaccatgtgttttttcctttcgttctaccaatctgtcatattattacattgacagattttcatatgttgagccattcttgcattccaggaataaatccctcttggaaattgtgtataatgcttttaacacagtgcagaatttagtttgccagtattttgttgaggatttttgcattagtattcataaggggtattggtctgtagtttccttttcttgtatgcctttggctttggtatcagggtaatgctggcttgtagaatgagttaggatttattccttcctcttcattttctttttaaaaagattttgagaatggtcaatgttggttcttttttaaatgtttggtagaattcaccagtgaagcaatcaagtccagggtatttcatcttgaggttttttattactgattcagtttcccatttcttcaggattcagtcttggtatgttttgtgtttgtgggaatttgtccacttcagctaggttatacagtttgttagcatacattgttcatagcactctctcataatcctttttatttctgtaagattcgtagtaatagtcccacttcattatggttttagtaacttgagtctttttttttttcttagtcaatctaggtaaacatttgttaattttgataatttaaattggtttatcttcaatcatgttgattctttcttctcaaatgtgcttttgaactcctccagtgaattattcatttcagttattatacttttaatctccagaatttcttattggttcctttctgttttatatctaccattggtagatataaacggtagtggtattgatgttaccattttgttcatgtatcatttttcacatctgactggcatgagattgtatgtatctcatttggttttaatttgcattgctctgatgattagtgatgctgagcatttttttcatctttgttggcttcttatatgtcttcatttgagaagagtctattcatatcctttgctcactttttaatggggttgttttttcttgttcatttgtttaagttccttatagattctggatattagtcttttgatggatgcatagtttgcaaaaactttctctcattctgtaggttgtctgtttattgtgttgtttcttttgctacgcagaagctctttagtttaagtcccatttgtcattttttgtcacaattgtttttgatgtcttagtcataaattatttgcttaggccagtgcccaaaagggtttttttctaggttttcttctagggtttttatagtttgaggtcttacatgtaagtctttaatcttgagctaatttttgtatatggtaagaggtaggggtccagttttgttcatccataaatggctagccagttttcctcgcaccatttattgaatagggtgtcctttccccattgtttatttttgttgacgttgctgaagatcagttagttgtagctgtgtgactttatttctggattctctatcctgttccattgatctgtgtgtctatttttatactagtactatgatgttttggttactgtagccttgtagtatggtttgaagtcaggtaatgtgatgcttctagatttgttctttttgctttggattgctttggctattcaggctctttttttgattccatatgaattttagattttttttttctgattttggggaaaatggcattggtaatttgatgggaattgcactgaatctgtagattgctttgggcaatgtggttattttaatgttattgattcttctaatccatgagcatggaatgtttttccattcgtgtcatctatgatttctttcatcagtgttttacagttctctttgtagagatctttcacttccttggttatatatactaggtattgtatatgtgtgtgtgtgtgtgtgtgtgtgtgtgtctattgtaaatgagattgagttcttgatttggttctcagattgaatgttgttggtgtataaaaatgctgcagattttatttttatttattttttaatttttattttttagtttctcaaatgagttgatgctgtggagttttgtacattgcttttgtatgttgaaaagttactgaagttgtttatcaggtctatgagtcttttggaggattctttagggttttctgggtatgtaatcatgttgtcagcaaacagagataattaatttgtcttcatcttttcctatttgggtaccttatatttctttctcatgcttgattgctccagctaggacttccagtattatgttgaataggagtggtgagagtggacatccttgtcttgttccagttcttagggagaatgctttcaactattgcccattcagtattgtgttgactgtgggtttgtcatatatggctcttagtattttcaggtatgttcctttgatgccttgtttgttgaggattttcgttatgaagggatattgaattttatcgaatgccttttctgtgtcttttgagaagattatgttatttttgcttttaactctgtttatgtggtaaatcacattcattgatttgtgtttgttgaaccgtccttgcatccaagggttaaacccacttgatcatggtgaactatctctttgatgtgctgttggatttagtttgatagcattttgttgaggatttttgtgtctatgtttatcagtaatgttgacctgtagttttctttttttgttatgtcattgctaggttttggaatcaggataatactagttgcatagaatgaggtgaaggagaaatctcctctcttcaattttttggaatagtttcagtaagattggtaccagttctttgtacatctggtggaatttagctgtaaatccatctggtctagggctttttttggttggtagattttttttattattattattactgattgaatttcgtaacttgttattggtctgttcagaatttcaatttctttctggttcagtctggaaggtgatgtgtttctaggaattaatccatttcctctaggtcttctaatttgtgcacatagagatgttcttagtagtctctgatgatcttttgtctttctgtggtgtcagttatgatgtcacttttgtcatttctgatagtgcttatttgaatctcttttctttttttcttggttaatctagccagcagtctgtcaatcttgtttatcttttcaaatatctaactttttgtgttgttgatactttgtatggtttttttttggtctcaatttcatttagttctgctctgatcataattatttcttctgttagctttgggtttagtttgttcttgcctttctagttcttaaaagtgtggtgttaagttgttaatttgagatctttgtgtgttttggtgtagtcatggagcactgtaaattttcttcttaatactgctttttctgtatctcagaggttttggtatgttgtgtctttattttcatttgattcaattaatttttttttatctctgccttaatttcattgtttacccaaaagtcattcaggagcaggttgtttagtttccatatacttgtgtgattcttagggttcctcttggtatttattttgattttattccactgtggtctgagaagatgcttgatatgattttgattgttttgaatttattgagacctgctttatgattgagcatgtggtcaattttagagactgttcgatgcacagatgagaagaatgtatattctgtggtagttaggtggagtatcctgtagatgtccattaggtccattaggttgagagtctaatttatgtccaaacctttgttagttttgtgccatgatctgtctagtgctgctggtggggtgttgaagtcccccactgttattttatggctatctctctttttcggttctagtagtagtttctaaatctgggtcttgtgatgttgggtacatatatatttaggatacgatatcttcttattgaattgagctctttatcattatgttgtacccttctttgtctttttttttttttttaactgttcttggtttaaagtttgttttatctgatacaagagtagcaacctctgttctcttttggtttccatttgcatgaaagatctttctccatccctttattttgagcctatgggtgtcattacatgtgagataggtctcttgaaggtagcagaggttgggtcttgtttttttaatccaacttgccactgtgtatcttttaagtggaggatttaggctgtttcctttcaaggttaatattgatatgtgaagttttattcctttgatagtgttgttagctagttgctttgtggtctttattgtgcgattgctttatagggtctgagttttgtacttatgtgtgcttttatggtagcaggtatcattctttcatttccatgtttagaactcctttgagcatttcctgtaggtccagtctgatggtgataaattccctttgtgtttgcttgtctgggaaagatttcatttcttctttgtttatgaagcttagatgaacaggatataaaattcttggccagcaattttttttttaaggaggctaaaaataggcccccagtctcttctgactgtaaagcttcggctgagaagtccactgttagcctgatgggttttcctctatgggtaatttggcccttttctctagctgcctttatgatttttgctttcatgttgaccttagtctgatgactgtttgtctcggggatgtcatcttatatggtatctctcaggagtctctgaatttcttgattctagatttcagcttctctagcaagattggagaaattttcctggattattccctcaaatatgttttccaagttccttactttttcttctctcaggaatgctagtaagtgaaaggtttgtttgctttacataatcccatatttcttgaaggctttgttcattttttaaaaattcagttttctttatttttgtctgacttggttaatttgaatgactggtctacaagctctgtaattcttctgctttgtctagcctattaactatattttaaaattcctttagtaaattttagaattcaagcagttctatttgtttctctcgtaatatagctatcttgtctatcatgtgctgaatcagttttctggtttctttgtattggatttcaacttttttcctggatcttgttgagtttagttgcaatacgtattttttattctttattggtcatcctatacatttcagtttggttaggatccattgctagagagctaatgtgatcctttgagatgccagaacaccctggctttttgtactgccagagttcttgcattgattccttctcatttgaggaagctgtctctttttattttgaatttgccatcatttggatgtgacttttttttccttaagggtatggctgtggtatatgttgtgtattatcatttgcctttgtttctgggtgcttccacagagccaaatgctatatggggtccttggttatggatagcttctgtgtagtgactttctcagatgctgcttactgtagtgatgtattggctctaagaactgacacctaacaccttgtctcctgtggagctgagggtgtggagatcccagggggctcatcttgtggactgcctagcactaagcccttttttagcagatttttatttggtgatgcagttcaggctgcagtccagtagatggcatttaagagtaagagccggcaggtaggctggcgttgggtggaagcacctgccctgagtgggcaggggatggtggcgggaagagatcctgtggggtgtgctgaggtcttgggggagaaggtgggtgggtacacccactcctcattctgtgctggcaggaacgtgatccacttcctatcatgcccctgtcacaaggctcccaaccttcatttcataaagattttgtcctttggttcctggctgcgggttgcgggtacactcctctgagggctgccaccaaaatgggctcagggagagtctcttcctccagatgggagcagacaactctgcaacttgtcttcccttgctggggtgttgctgctctgtgtagggaaggggagttgggccctacccttcctgaaagcttgagctgtgcagggctcactttcagtagaggtggagccgctacaagatgcatgaaatacgctgtgtgtccgagtgcatgtgctggcccctggcagagagaacactgctgcatcagcaacagtgtagggggatgcaggagatgaccccttccccacatccattcctgggtaatgatacttcctcttgtagcagttggcactgtgcctgcatttcctttgtcccaaggtgtgcttttgatgggctgcactctcttccacttagggatggcccacgcagggggttagatctccagagatctcacagttacctggggaactgctggttccctgtgcttgccaaagttagagtggtctgtgaggtgtgtttgcagggaatctggtggtgtggtgactcaagggcagagaatccctgggcagggcagcatcccactgctggcgcacgacaagtatggtatctggcacctgagaggagtgtggacacgcatgtacacacgagttggccaccagattctccagccccaggaggttttcaagtcaccatcaatagtattgctttgggtcacaagggcagaggagcactctccaacagtttgatggtcaggagattgttggaggggtaaggggagcagagaactactcccacctaccctttccacagggctccaaggtccttgagggtcaatctctgccagagtcttgctgctttccttttctgcaccccagcttcttcccttgggcactctgacaggtcctggctcccttccctcagttttctgtctagaatttgtccactcaccagtaactttgatctattttttgagaaaaactggcttttgatattcctagtaagccatcttgggacaaaaacaaaaacaaaaacacgcacacacaccacaaaacaaaaaacaattgcatctgttattgaatgtcctagtctttaagtgtctggctctccaagagggaaaggggaacaaagaaaggggacaaaaccagacgctggccttttaaatcctctgaaaattgctagccatagcaggaggggtttgcaacagtagctgcctctgtgtctgcatctccctgattagaagcagcaattgtgatcagagcacagactccctgatgtttggagcacagggtccttattggcccaccttgactttcataagccgtgtacaagctacttcaggaacaagtgcatggctacctgtccaggggttggggtggtggatgggtagctgtcattgtgctaaaacctgaagtcgactgaaatgaacctcagtttaccctccaaaccttcccctggaagctgcaagcctttaatagattctagagtcccaaaatagttacatcagacagattctgccaatgtgattgtggtctaggtagggtgacagattctagatgcctcttactctgacatcttctctctatttcctaaatcataatgtttcaaagagtgtagtacaacacagtctacagttactttcctatattcctatagctctaatgctatataattagtcctttcctttgtctaccaagtaaggtaattatttacctgtgtgttcatcttcctaactgtattgtgaacacttccactagtcttcccatggtatacatagaatatattcaataacgatttgaatgcaagaattacacattatgaatgtggcttcttcatttcatcatcattgacttgtgatttttaaagacgtttgagtttgaacacagaaaaattgaaggagtttacatccagtgtctttatctcagtaaaatggagtaagttcatccatctgttgaaagtgattggatggggatgagtttcaaggcggcatgagatgtgtaatacctgctgtgtgtacttcagggaacaatctaatagcaataaattttttttaagtgctgattggcagctaaggcccatgcgaggttggatagcatacattgtaatggatttagtgcctttctccaaactgcttcatgtcgtaaaagtagagcagagaatatgaatggttgcgatagtctaggtttagagaatgctgaaaacagtaggaaaatcatgaatgaactaggtgctgaactaggaaagtagaaatgagggagggtgatgtataatggcaaggtggatgtgaaaagcatacataataacggggagaaaaggaaatggtgagatgttaggaaaagtgatctggagtctaaatttggcaagtgaggattaattttctctttcccactgagttaagaaaatgatagaaaattttaccacgaagtcctgaattttcaatttataattagtctatttcctcactcaacagacatttaatgtgtctcttgtttgttaggttctgtgctaactaccaggataacaaagatgcaaaagtaaaatttatatctcagcagttctggtgcctaacagtgcttagcatttagtaaatacttgttgattttaattgatgcttacataatctgatacatccaagaaaattttctagctttctgttagtcaacaatgacagcaggactgtattatttgtgtgaccttccaccttaattttcatcacatgtggactctagtatcacctggattattcagattgattttcttacttaaattcagtagaaaaattgtgaatctgactatgaggggaggcagtatgaactcattaaatatgtattcctgtttggagaaatattcgctggatagctagaattttagattgggaaatcaggttttacatcagcaatcaaatgaatagtagtttagaagttttattttttaacttctcattttgaaataatttcagatttacaaaaaaattgcaaaaatagaacaagcaatttcagctttcccagtgttagcatttcatataaccacagtacaatgatcaaaccagaaaattaacattagtaaataccttaatccataggccttattcagattccatcaattattccaccagtgtccttttttctgtactaggatccaatccaggatcacacatcatatttagtcacaatgtctcccttaccttctttaacattgaacaattctttagtctttgtctttcatgacctcagtactttcgaagagtactggccaaggctgggcatcgtggctcatgtctgtaatttcagcactttgggaggctgaggtgggtggatcacttgagtccaagaggttgaggctgcagtgagctgtgatcacaccactccagcccgcgtgacagagtgagaccctgtctcaaaaaaaaaaaaaaaaagtactggccaattatgtttcaaaatgtctatgaatttggatttttctatttccttgtaattaactgtaagttagtacttttttggtaagaataccagaagagtaatgttatatccttcccagtgcatcacatcaggaggcacataatgttgatgtgtctcattactgttgacattaattttgatcactttattaaggatgtgtctgccaggtttgtcctcagttaacactgttttctcacttttagttaatgattatccaatgggcagatactttgaggctgtgtaaatatcctgtttctttttgtgcttttacccactagttgtatcatccattaaaattctttttaaaacaattattactattgtgtttaccaattggagattttttttctcatcatttcttttaaaattactaattggggccaggcacagtggctcatgcctgtaatcccagcactttgggaggccgaggtgggtggatcaggagttcgagaccagcctggccaatgtggtgaaaccccatctctactaaaaatacaaaaattagcagggcgtggtggcacacacctgtaatcccagctactcgggaggctgagacaggagacttgcttgaacttgggaggtggaggttgcagtgagtcgagatcgcaccactgcactccagcctgggtgacagagtgaaactccatctcaaaaaaaaaaaattactaattggatttctattataaggaagagtttttctcttctctctcattgatttatttattcaattatttacatcaccatggactcagggatattgtattctttgagttataatctgttactaccattatgtattttgttgctcaaattgtcacagatttggccactggaagctctgtcaagttgacgtctgtgtccttgcaacatgtccccattattttttgagtgtttcctttctagcaccacaggatattccacattcatctttagatagtatttccttttaatgtgtggtttgcatttcaaattattttttgcttttttttaggtatgaggatacatgggctgcacttcacagaagagccaaagactgtgcaagtgctggagaggtaaagaattgactaatcttatactcgtggcaaactttcctttttcagtgctaaatggtattttttaaaaattgaatttataattgtttgtgtcaaaatgttttgcaggatatctgaaattgaatctagtcgttgattatgaaactccctgaataaagcacctttttatcatttctctgtcaagtaatttagtttagttgagcaagagagtttataacttttattctaaggacaggtaaatacttgttttatgtagatataatgctctgaattttagtctgatgaatttgcaatatatgtaaattataagacatctctttataccctatataagacatctctttctacactatttaagaattccttattatttggtcaaaaaaacttaactttgctcagtctatccaaaattattaatttgcctaacaaataaatacaaaaatttcaggggtcatcctcagttcacttagaagaacaaagtatttttaagcactagtgtcttgtaatttaaatgacttggtaaatgtacatagccaaaatcgaatactctcctcaatgttgttgatgtcaatcaaaccttatttttttctgaaatgatttctgtaattctgactttaaataaatttagactgattttctttaccatttacctaaattaatgaagctgtaatagttatatacaacacaggaatatatatgatgaaatgtagacactagcatttctcttagaacttactgataagaagaaaatgtaggtttctggtagtaaggcagaatagatactttgaaaagccctacagctataaaacacttaaatgttggatatattttttaaaagttctttaagatacattaagcccacaaaaattaagggaaacataaagggccaacaacaacaacaacacaacaaaacagaacagggaactgaaatcagagtcattaaaacaaaacaaaacaaaacatggaagtcgggatcaaaatactaaaacaaaagctttggagatttgtgggaataggagactttgtctgtggggatctgaatctgagacttttgataaagctctttggactttgaggtggctacatccccctggtgaaagcttaagctagggggaaaaaaaatgtacctgttggctaaaggagtcaacaaggaaacctgtctggcttcctaagaagttggcatagcctcgtttcttgatttgttaccatggtattggcctcataggagtatggggttctaagttatatttcctgcctgatcaaagaacctctaagttaagaaatgaaagagttggctgggcacggtggctcacacctgtaatcccagcactttgggaggccaaggtgggtggattacctgaggtcgggagtttgagactagcctggccaacatggtgaaaccccatctctaataaaaatacaaaaattagctgggcgtggtggctcatgcctgtaatcccaactactcgggaggctgaggcagaagaatcgcttcaacctgggaggcggaggttacggtgagccaagattgcaccattgcactccagcctgggtgacagaaactctgtctcaaaaaaaaaaaaaaaggtgcaggtaatttgtgttctttgacacccaacaaaaacaaatgcaaattctccatggatgaaactgtctaaacctaggtccctcagatttccacagattaaatcaggctccctgtcctcaaaatgttagcaatcacacaagtaaaccaccaaaagtttgagtcaccagaaccaaagtgtgagatttagacccataaaggactgtagatactgcactattgaatattgactgttaaatagttatatataaaatctttcaagagataaaagatggacttaaacgtgagtaaggaagaaggcactatcaaatattttaaagtcattgaaattacaaacccaaaagatgtgcttaacagcaatttgaggcagctgaagaaatagtgaggtacaagagagagtcaaagagtacacagaaaggatctcagaaagaaaatggaaaatatgaaagaagaattgataggcagagaatacttataaaaggtctttaggttgaaccaggtgagattgccaatattcgatgaatttttatctgtaaaattgcagtttcatatgagttagcccaacatatccagtaaacctaaatagttctagaaagagcatgagggaaagacagtgtaggaaaaacatgtctgagaattttccataaatgagatatgtaaatcctcagatccagaaagtacaacaagcaagcaagataataatccattcctagacacctcatactggagctacagaacccagttaggctcggtggctcacacctgtaatcccagcatttggggaggctgaggcgggtggatcacctgaggtcaggagtttgagaccagcctggccaacatggtgaaaccccatctctattaaaaatacaaaaattagctgggcatggtggtgtgtgcctgtagtccaagctattcgggaggctgaggcaggagaatcgcttgaacctgggaggcagaggttgcaatgagccgagatcatgccactgcactccagcctgggcaacagcaagactgtctaaagcaacaacaacaaaaactacagaatcctaaaggagaggagaagatcttaactagagagaagatagatcacttataaatgaatgagttccacagcagacttttcaaactgttgtcaagaattagagtaaaagcaagacatactcagataaaaacatttttctatcagcaatcgtccaataaaagaacttctaaagaatgtaattcaggaaaaaaggaaactcattttagaagatgggtctgagatgtaggaaggaatagtgagcagagaaaatggtaaacatagataaatctaaacagtgggacatatatattagttatctaatttgtggggttaaaatgatagaagaataatgctagataacaaagcatgtaagatggaaggcagattatcagcgttcaagcattctaacacttccgtattatttgggggaaatgtattgatattgattaacctcacttttaaaagttaattatggagggcagaatttcaagggtaaccacatacaaaaaaaatagaaagtggttgggtgtggtggctcacacctgtaatcccagcactttgggaggccaaggcaggcagatcacttgaagtcaggagttcgagaccagcctgagcaacgtggtgaaatcctgtctctactgaaaatacaaaaaattagcctggtgtggtggcaggcacctgtaattccagctacttgggaggctgagacaggagaatcacttgaacctgggaggcagaggttgtaatgagctgagattgagccaccgcactctaggctgggtaacagagcaagactctgtttatcttctaaactagtagaaaaaaactagaacaatgagaaagaattcagtcaatgcaaaagatgacaagaaaccagaggaaaatgcataacagtagaataaacagaataagatggtaaatgtgaatatatctgcagcctcaatatttttaaatgattaatctagattaatctaaagggcatattttgaaagacgaggaaaagtctattaatagtttataagttactgacaagagaaacacctagaacataggacacagaaagattgaatgtatgggcatacctcagaaatattgtcaatttggttccagaccactgcaataaagccaatattgccagaaagcaagtcacacaaattttttagtttcttagtgcatataaaagttatgtttatactataccattgtctattaagtatgtctaaaaaagcaatgtaataccttaaataaaaaatactgtattgcttaaaaaatgctgacaattgcctgagccttcagtgaatcataaccttttttctggttgagagttttgtttgtttttttttaatgtttatagctgccgactgatcagggtggtggttactgaaggttggggtggttgtggcaatttcttgaataagacagcgatgaagtttgctgcatctattgactcttcctttcacaaaagattcctctgtagcatgcaatgctgtttgatagcattttacccatagtagaacttctttcaaaattggagtcaatcaactcctcatccattcatgcttgatcatgagattgtggcaattcagtcacatcttcaagctccacttctaattcgagttctcttgctatttttaccgcatttggagttacttctgaagccttgaacccctcaaagccatccatgagggttggaatcaatttcttccaaactcctgttaatgttggtattttgatttcctcccatgagtcatgaatgttgtgtgatggcatctagaatagtgtattctttccaggagattttcaatttagtttgctcagatcaattgaaggaacttctatctatggcagctataaccttataaaatgtgtttcttaaacaataacacttaaaagttgatatgactccttaattcacaggctacagaatggatgttgcattagtgggcatgaaaacaatgttaattaacagttgcttgtgtgcagtaacttggcgtctccatgctggacacatataagccatgcatattagctgtcgatactctgttcatacagcctcagtgtgtagacaatttaaatttctaacaattatgatgttctaacaattgtatttgaaatgcaattcgagaatctactcacacgttgttttaaaatgtgtatcaagcttaaatataaagttttcctatatatataaaacttgctattgatatttgcaaggcttatgaatattggataataaaaggcattctacctgggagacattcttcaatgtatgcctatggtggcaaaccaaatccagcaatgtataaaaaacaaaatacacttagtttattccagaattaaaaggttaacttgacattagaaaatcttttacatgcaattgactcttaagtattaaaagtgaaaatgatcgtcagatgcagaaaatacatttcataaaattaaatacctattcagggtaaaaagttttagcaaatttttaatggaagacagcttctttgtcctgatatctaccaaaaacctgcagtgtttgacttgcagtattttaatcccatattcggccatcttgctaaattctcttattctattactttgtatttgggggtgcgagttgttttgggtagatggtaagtttgtttctttccttctaagccatacaacttttaatttttcatgtttcttatactgggtagaaactctagtataatgttgaataaaaatagttgaagaccttgttcacattttggcttcattagatttaaatgtgaaaaggaaaactatacattttttggaaaatggtagaagagaatatgtttaagaccttagggtgggaaagatttcttaagtaagatataaaaagcaccagccataaataagtacattgataatttttgtcaaaactttttttaatcaaacaacaccgtgaaaaattaagtgatttataagacagaggctaagtgttcagaaaatatgaataacccctataaaccaataaaaagaggatgaaaataacctaggagaaaagtgagtaaaagatatcagcaggcatattgcagaagagaaaacaggaatggccagtacacagtaaaatatgttcaaccttgcttggtatcaaggaaatgcaaattgaaaccccaaattttcactcattagattaccaaaaatttaagaagcttgagctttctgtgcagatggtcattatttgcagatgacagttttgtttctttcctcggaagaaatgtgatgataaacaactagaacttgggagtataaattagaacaatcacgttagaaaaaatgagttggcattaagtagaagttaaagttgcacatgcctttcaagcaacaattctgcttctaggaatttttccagagcattacatccaacctgcaggggctggggagggggatctcattaccctaggccctgggcaatgaggagatggatatcttggacacatctgcaattcatttgtgaaacccttgcacatgtgcaccttgagatttgtaccagaatgtttgtagcaagcttggtttaatctttggacagttccgaagtccatctgcagggaaaagtgtggtattattcataaaataaataccgtatacagcagtgaaaattagtgaactactacacctatatgtatcaatatgtatgaatcccatgttaaatgaagactgtgtcctatagaggagctttaacaacaatcattcttttgattattagaagcattaacaatatatacaggagaaagaatttcctgtcagatgtgttattgaatttgtgctacctcaggatcttaaatttttgtataattggttattgtaaaacccacagctcatcaaaagtacttatgttgctttgcagaaacagtacccagccttaaaaatgaaagtttattttaaagccttctgtggtgtattattgagatatatgtaaatatttaaatgtatatctttagtatgcatagtattaaacttgtcattttgtaaatttattttgtcagaccgctcatgtgtctttggtgggctttaccagcataacctcctggggcaaatatacttttggacaattccatcttgtttaacaaattattttatactcatctactttaaagctaattattataactatatagtcttagaattcagagcaatagtttataaaacaagcaactgtgatcaaaggtaactttgttgtttaggcttgttttctttttttttgagacggagtctcgatctgtctccaggctggagtgcagtggtgcgatcttggctctctgcaacctctgcctcccaggttcaagcgattctcctgcctcagcctcccgagtagctgggactacaggcacatatgccaccatgcccagctaatttttgtatttttagtagagatggagtttcaccatgttggccaggatggtctcgatctctcaacctcatgatccgccagcctcagcctcccaaagtgctgggattacaggcgtgagccaccgcacccagcctgtctaggctttttctaaataagggtttcgattttttttctcctttagcagtgtattaaaaaaataccataaatagttaatacttagggcttaaactctgagggcagttttctaaagttagactttcagtgttttgcctctcctgttattgtgaaatattagcttgccttcaaattgaactttcaagattcatggttttgtttaacagtttgacattaagccagttgaatttgactgtttcactgtcagaaagtgaactgaacgtagtgttggaaatcctggtttctgctccttgctgcacaaatacctgttgaccttgggcagataacatggcctctcttagttttctcatctataaaatggcttaacactacttattctgcttatcaaacttgtgtggaaatcaaataaaatgaagtgttccttaaaactctgaactgctgagttttatactaagatcctattctacatcattggtgtaccttttcatcattggtgtgctttttcttccttctcctaacctcaatatccagaaagaattttggaataaagcactatgggtttgtcttgctccttaaacttaatttcctgggggtgaatcttggtttattctgagttacttcgaggtggaaaaattgaacttccggagatagctttttttaatcattaagaaattacacatgataaaatgaataggtaacagtacagtttttcagaaccgtttcttttgctagatttttacttttcttcttccctttatatacccctatagcacaatccctagtaggttgattaagggcataggcttactgtcaaattccctgggatggaatctaagtccactgtggtccttaaggaagtaacttaacttcattacacctcaatttttaaaatctgtataatggaggttataatattgcttagtgtatagagttgctgtgtggtttaaatgagataatatatgtaaattacttagcacagggtctggtatttagaaaatgttcaaaatgttttagtattgtataattgttgataattattgataatttctgagaatctgtttacccttccattcttttaaatgatagtttagtgttttctgatatagtttttctacatatgcttatattctatattcagaatttaattttcagttttattgcaggtatgaactaaactgtagttaaatttcaatatttaaacattgcactttaattttcagtaagaaatggttaatatgtaatttttaatatctaaaattatttattctagagttttcaaattagaaaccaaaatagcccataatataggaatttttttttttagagtttaaaatctgaagttaagagaatttatgagggctgccactgaagtataaacaataagagggcaggaatcattacatcttcagtatccaaaatagggcttagcaaatagtgggtggtcagtggaagtttgtggaatattataaatgaattttgtgaacatagatccttgtttcaagctttggtttccttactgcattttagctgttttttcagtatgttttaagctacttttaaagattttttttaaagaccagttggcaacagacatttttaaatacacaaaaataatgagaaatgcggtttgcgtgaaacttgatgtggcctcccagctcagttgaggcttgaatgtgagagattatgtgtttatccctccagcgtgggctgagaaaccacagggagatgtgtcatagcttagttctttatttcaaatgagaattcctactatagtgaaatgtacgaacaaaaacaatctagtactacatacaaataattttgtatctttgatatattcattcctccaaagttctttcttaatttattaagtggaacttagtaagaatcagttgtattcagattctaactcttaaagagccttaatcctggccgggcacagtggctcatgcctgtaatcctaacactttgggaggccaagatgggtggattgcttgaggccaggagttcaaaaccagcctggccaacttggtgaaaccctgtctctactaaaaatacaaaaaattagccgggtgtggtggtaggtgcctgtagtcccaactactggggagtctgaggcaggagaatcgcatgaacctgggaggcggaggttgcagtgagccaagatagcaccactgcactccagcctgggcaacaagagcgaaacttcgtctcaaaaaaaaaaaaaaaaaaaaaaaagaaccttaatcttgagatgtacaaattgtctgttttgaatactcaaattcattttcttctgtcatataatgggttttgttacctttattttttatcgtacagattatggagttttttccacagttcttgcttattcatgttgatattttcaaaagatcacctcttcttgctccttctaagtctttctaggcccttgtccctcccactatgttaagaccaaaacagaattgtctgggagaaactaatgtctgtcattttctttatagtctttagcaaaagaagttagaattatcttaggctattctagaatttcacaaccttgctattaggaaccctttacatctgctgaattcctcattaacttaaatcatttcctctttttctggaattctggaattggccagtttcctcaaaattcctttatatactttatgcaataagtattcctgtttaaatgtaaattgaaacatggtatattctaaatgtattagggaacttttctttgaagacttcctttcgtaaagccaataattacccgttaattatgttttatgtttgttttctttttggttgttagtggtagttttttgtttttgttttttttttttctagatttagcttttcaaatacatggtctgcttaaaacagggtatacttagaagtgacttctgaagtcatttttaaactttctcttctgtgggttaagatgcactgatacaagcagtaattggaggtttcctgcactgaatattaagttgtttcttttctaaaaatgaaaacaacttcagtctcttttagaatgtaccgtaatctctactgagtagaggggttgttaaagataacattaaatctcattacgttaactgtactttctttgtgcctaaaacctggtttcactttaccccccttcttgtgtgctgcagctggtggatagcgaggtggtcatgctttctgcgcactgggagaagaaaaagacaagcctcgtggagctgcaagagcagctccagcagctcccagctttaatcgcagacttagaatccatgacagcaaatctgagtaagtccaatgttttcattgtacattacttttaggaatgaaaacaacttgggcagggtttggtgtaatttcagagcttttcaggaacacatgaaattctgggttaacaggattttttggaaaatcatgatttcatattttgattagttgaggattccacagaaaatgatgtaaagtgtagaaattagttctgtttctgcctcaggtcagctccggacacataattataattatgttgattcttaaagtgactcaggttgtctttgttgacatttggtctctgtttaaaagcatacatatagaaaatggattaggtgactttgtccttactgtagaatgtattccagaaattgttgcttttaaaatttagatatgctagaacttcatgtcttgtagtgtatttttttctcttcaaacggattggagatcaaacaaacctggttaaatgagggtacttgtgctgggtgtggtggcacgtgcctgcagttgcagctattctggagactgaggcaggaggagtgcttgagcccaggagtttgaatccagcctgggcaacatagtgagaccttgtctcaaacaacaacaacaacaaagtaaattagggtacctgtttggctaaatttatactctgtggaaatttatttttttgtcgttgttcatttggatggattatgttggtattctttttttcttgggtttatattcagaaaattatcttttatgtttgatgatgccacatctaaggataatattgcagcttactatttcctaatcaagcttaagatcttagtaaagtaggaggtaggagctgtctgtatgagctaataacctgttttagtcttttaggtgggaagctaaagataccctattatctcctcctgtttttaatattgccttattcaaagcaaaacatgactgatttacaaggcaagtaattggcaagtcataagacagttttttgtgtgtgaacaaaatagatacgtagtatttggagtgctgttgctgataacagtagctaatgtttatagcacctactgtatgtcagagatgattagatgatttacagatactatctgtaattctcacaagaaccccacaaaagtagcttttattattcccaatttacagataaactaaggcttggagaggttgcaacttgctcagaatcataaaatttataaatgcatctaggattccaaccacattgatgatatcctcaatatcagtatgaggcagtaggatgaggtgatgaggcagtgggatgggagctctcagtaggtctctatgaactgtattcttcaagtcccctggctgttgccatgcctttcagggtcagtgttttgttatttctgaaggcagggcatggaaaagagattctgggtcttagaaaagtgtaaaatggctgtgattgccgtctgcattggtttcctcttacaggtatagtaatggtccttcccaagccttggacatagcctttaagatgttcggaacattcttcttagccactttctttcagctcatcttcctgtatctctttgagtcacttgcttttcattggttgtatgtttctttgcagacatgttctcttatgataacctcttttatttccccagctgagagtaaatctgtttacggatagttgttgtttgcttaataccactctattgattaaatgcattctgccacagttctcattattttcatagtcaattctgtttagaaaatgcagtctctataagtctttcatagaatatattgtatgttcgttcccaattaggattctaatatcctgaaaaatgtttgatgtttagtgacacatgaccttattcttcagaaactgcattttggcttcttaaatgcacaaggtaggccttccaaatgttcacttgaatcctctcttttttagtaatctgagaacatctaacactaaagacaaatgaaagctaaaacattatctgatatactgttctggttaatcactgctaaattaatttgagtcatttttttcctctcatctatgtctaaccgatattgagctctttttagagagttagttcagttttttttagaaggtatgtctggatggttgcttttcatatatattgccaatctgaattatctgttagcctttgaaatacatgcttcctttgggttttaatctattgctgttatttgcctgatatttataattagtaatgaatgactgtggaagatagcatatcaaaacttggaattttagagacctagttagtatttgttggcctagaataagcccagagagagttgttttaaaatcatgaggcttttagctaagcaatttaagctttatagaatcattgctgacgatattctttacagtaggaaaacaaacactttgaagccaaatttgatggagtgagttgtgtaaacatgtatctgtaccattaatgtactttatgaattcattttgatgcatttatgtatcagtcttagattttggaaacatttagtgttttaaatgcttactcatttactgggtttttttttttggaagcctcaaaatctctcctattattacccaaataccttgacataatattacaaagcttaaatagttaagcaataataaaaaataaaaacaaacttagaagaaaatggtaaccgattatatttagtcacagggtccccctaacttctttgaacttgttgccctttcactgtcaaatgtaacaccatatcctgtcagtccctccattttccaggctgcttcactcttttggtcttactttgctctctagaggccctgcttttattgaagggcaaaggatttatgttatgtgagcaatttggacttttgatgatgcttttagctgtgttatcccatggcttcattaatatggctcctggtacctagccccttgggaattgttaagttacaacagatgatccattcatattggcttcagtccagcttacaggagcctatttaattgatacttactggtaaggtttgtcgttttaaaaataagtaataagggtatgctgggaactggaaaacaagggctatgaactgacagatcgggtttggctcccaatccaacttcctcactttaaaaactgtgcagatttctcaatggctccaagctttagttttcttgtctgcaaaatgacgatgagcatacctgtcttgtaggtatttggaggattaaaggagatgacaaacgtaaccacttagcacagtgcctggtacatgctgggcatctgccacgcaccacgcactgcgtacagactctggacacacagcagtgaacaaggctgggcacctgccatcaagatgctgacgttctaatgggggcctctctagcctttgcgaattcacaaaaccattattctgtgacacgagggtttggatggatgttaggcagtttagcttgtgctgcaaaacagtttagaatgcaaaaccacaagattcaatgtggtgatattagtattctgtacattgaaggtgtgtaagcatacaatggaatatttttatccagattctatgcactttcttattctgtgaaaaaccacagtgctttttaatcataaaactggaaaaatatgtttgaaaagtatatactgaattatcttgaacttccactagagggtagtataatcctattcctttattgaagttcaaaatgttaaagccttgtctttgaattttctcttagtttattttatatgacctatttttaaaagactgttcccttcatctagaacagaagattctgggttttgtttttgttttaaaattttaatttttttaagagacagagtctcactctgttgttcaggctgtagcatggtgatgtgatcatagctcactgcagcctcagactattcctggactcaagcgatcttcctgcctcagcctcccaaagctctggcattacaggattgagccactgtacccagccagaagatgctgttaactcttagataagaattcttagatataagagaatagcagccgtatactgagtttgtgtttttcttttggtttgacctagcctgatacagtattattttgcttttttctgtacagaattttagagggcatctaacaaagagattatcatagctctgtcagtttttcatggactagattatcagatgtccaggttcctttctgaggctagacccttcaagaggcacattaattctcttagacaccttttaggctactacatagatctcatttgttccataatggcttttgcaagttaatgtacttcttaaagtttccttattcataccatcattaccttattaccttagtacataaaagtgtaacgtaagcatttgaacagtcttgtggtctttcagtacctggcctctgtgacctatgggtttgcagccaaggagagttctttgttccataaggctaattattttgttagaaaataactcattaagtgggaaataattttagtgtgctgcttcattctttatatatcagtggttacactacagatgatatgtatttgaaacaaatggcacaaagaaaaattccaaacagaattgcttttcctctgggacggccttcttgcaaaaatttgtgaagctcttttttgcacagctgtcaggcattcccaaatggcttttcacaataaaattctacctatctctttcactgatcactaaatgagacatatgcggttgttatagcgagcaaaatggtgaggcttgagcttcttgtaaaggtatatttgtgtccatggaggcctgctagtattttatgtatatgcatcctaagttggttaccaaatgtactcatatatgcaacttgttttgcaacaggaaatgagcaggctgtgacagggaaattaaatttctgctaacttaaattcaacataaaatattcggaatacacattacgtatgtacttgtcattattatatgaagagcttttttaagtttaatataaggggatgaacctttatttttttcaatgcaattattttatattttgttactgatttcaagtctgctaagtgttaaaatggaaaattttcatcatttcttctgttttaagtcactgataatgtgacctggtttaatatactaaaagtatcatcatgttgtttaatgttttctaagttctctgctcatgtttattcttttacaaaatttggcatagtctcttaatatttaaactagatgaccatgaatagttttgccttctcagttattttacatgttagagtaataaaatcattctatcaccagaaattattctttattgaattcaacagacagggttattaggggatagcaaaaaagcaaaaatacagtctgcacctttaaggcccttactgattcctgagagatatgagagtacacaactggttggatgatatcagtcagaatgtgagtcctgtgtgaggctgaaaggtctggggaagcacagaagaggaagggagccctgtgggaggagggcgggctgccactggcctaagcctgaaaagacaggccggggttagggacaggcagaggcaaggaggaggaggcaccaacgctcagtactcctcttgttttgctgtaatgtagaatatgtgaaggaaagaagtgaagtaaacagtttgtggccagagagcagtagctctctgaatgataaggagtttaacttgaaagggctggggagcctgtgaagctttttaaaggggagaacataaatatgaatttggtgttagcagtaaaatgaccacggactatttcaagcatttttagtctaaatttgtcattcagcacaagagcatgaggccgtcctattcagaagtatgtacagtttgtttctcattaggaattccaggttgataaaccactcacatgttttcatctggtccccacgttattaacaaaagagtgactagggcagcaagtacaatttgtacctagaacagaatttctgtctgtgagaaattaattggcctgcctagagatcaacctcatttaagttcctggcctcattagctctgtagtcaaccaacagagctagaatctaaatggaaattgccatctgtccagataaagattaaagaggtaaaaagaacatacacattttccagcatagaataattgttggctccattacatagtttcttttcagaaaaatcatttgaaatttaattccttttacctgtaggagatcttaagtctaagactatagcctggaaaataacttataggtgtgtaagtttgtaagataaaaatgaaaatgttgttgacattttgatctaatagatccatagatcttgtttacatcatgatcattactggtcaatgaaattattagttttcaatcacttttattaaatataaaacttagctaatctaaaaattttctctattttttatattcaaacattaattatttactgtcaagtattaagtttaggtacttcggctcatttaatccttttaacagctttgcaagatatgtgttgttagctctctcttcacagacgaggtatcacattgcatctcatctggcaggagcagagctgggtttttaagcttgtgcttcaaagcctagctcttaacccgtcccccatatgctaagcatacatgcacgatactgaatgcaccaagtagcttagagttaaatggagtctatattaaatttaactattctagtttttatcactaatcaaaatgaaacagccttttaaataatcctattagctatgatagtgttttatacattttaagaccatgtcagactagttataacagaatgagctgaatattgcttctttagtactaggagtactagctcccaagctgaatctcctagtcagtttttcatttaataaaacaaaaaacaatgtaggctgggtggggtggctcacacctgtaattccagcactttgggaggccaacgcaggaagatcgctcaagcccaggagttcaagaccagccaggtcatagtgaggtctcgtctctacaaaaaaatatatatataaatggcagtacatcattttgcctgattcccccatataaactccttatgtaccatttatgacattctttaaaatcttaaatacagttattggctaaaatttagattttacaaattgtttcatttaagcgttccataatcacatatagtagctgtttgatgtggtccctgaagctagattcaaaagcaccatgaactacattattattagccttttccagatttaccgtgatatattaatatgataaaagtcagtacctaaaatgtctgaagaaaactgctaaactgcttgtcatcaaattttcacttttgaataaaatgttattcccccccgaccaaattcatgtttttaagccttacaccctagcagagaggagagggagtttttataagcacaaatatttaatagagttaaaatttaggatattagaaagtgtcaaaaaaaaaaaaggaataagacctactattttatagcacagtagggtaactattgccaataataacttaattgtatattttaaaataacttaaagaatgtaattggattgtttctaactcaaaggataaatgcttgagaggaggataaaaagagaaaatgtcaacacttctggattatctaatagctgtttggatcaaacaaagattaattaaaaataaaatcttcattaataaaaattcatactttattaatttttttttacttaatattattttcagttccaaggtctcattcaggagaccacattaaatttagtcatcttgtcttcttaggctcctcctggctctgacagtttctcaaacattttttgtttttgatgaccatgacaattttttgagacatggtgatcagatattttgtagactgtccctcagttgcaaattgagtactttgtaatattttggataacagtcctttatcatgtatgttctgcaatgattttctcccagtttcttttcttttaaaaaatttttaagtatttacgtatattttttgcttttattattatttttaattgacacataattgtgtatatttatagggcacagtgtgatttttgatacatgtacacagtgtgtaataaatcaaggtagtcagcatatccatctcctcaaacatcatttttttgttttgggaacattcaaaatccactcttttgctatttgaacatgtacagtaaattgttatactctccctacagtgctatagaatactagaacttattcttcctatctagctgtaattttgtatctgttaaccaacctttggctactgcccacctccccagcagcctctagtaaacactgttctaccctctacttccctgggatcaacgtttttagcttccacatgtgggtgaaaacatacagtatttatctttctgtgcctggcttatttcacttaacataatgtcctcgaggcttatccatgttgctgcgaatgatagtacttaaatcttttttacagctgaatagtattccatcgtttatatataacacattttctttatccattcatctattgatggatgcttaggttgaattcatatctcggctattgtgtatagagctgcaatgaacatgggagtgcagataatgcttcagcatactgatttcctttcccttggctgtattcccgatagtagtgggactgctggtcatatggtagttctacttttgaatttttaaggaacttccatactgttttccatagtggttatactaatttaaattcccgacaacagcgtatgagaactcgtttctccgcgttcttgacagaatttgttatttttggtcttttcgctaatagctattctttttttttttttagttttagggggtaagggggtacatgtgcttgtttgttgtgtggctgtattgcatattggaggagattgggcttgtagtgtacccaatacccaaacagtgaacgttgtacccagtaggtagtttttcaatctttgtcccttcccacgcttcccccctttttggagtccctagtgcctgttatttccatgtggcaatagctattctaacgagggtgagatgatatctcattgtggtttcgatttgtatttcctttataattagtgatgttgaacatttttccatatacctgttggccattcatgtaccttcttttgagagatgtctattcagttcatttgcccatttttaataggttttttttaatttttattttttgctgttgcattgtttgggttccttgtgtaagaatttcttgggaattttaattatagggccattatgaaaaatagtatggaggttcctctgaaacaaaacaaaacgaaaatagaacaccatatggccagcagtcccagtactagggatatattcaaaggaaaggatattaatcccttgtgggatgagtagtttgtaggtattttctcccattttgctggttgtcttttcagtcttgatgtttttttttctccaggcagaagctttttagtttgatacagtctagtttgtctatttttgcttttgtcgcttgtgtcttgaggtcttctccataaaatctttgtccaaaccaatgttctgaaatgtttcccatatgttttcttctagtagtttcatggtttcagctcttacatttaagtctttagtccattatgagttgatttttgtatagggtgaacgttaggggtctagtttcattcttctgcatatggatattcgcttatcccagcatcgtttattgatgagaccatgtatttcccaatgaatgttctcggtgcctttgtcaaaaactggttggctataaatatgtggatttatttgtgggttttctgggttctctgttctgttccagcatgtctgtttttatgctagcatcatgctgttttggttactatagctttttgtagtatattttgaagtcagacaatctgatgattccagctttgttattttaactcaggattgctctggctattcagggtcttgtgtgattccatatgagttttagaattttttttttctatttctgtgaggaatgtcattggtgttttgatagggattgcatttaatctgtagatcacttttggcagcatgatcattttcacaatattcttctaatgcatgaacatggggatgtcttttcatttttgtgtcttcttcaacttctttcattagtgttttatactttgtcttgtagagatctttcatccccttgatctgaaactcctaggctcaagcaatcctcctgcctcagcctcccgaagtgctgagattacaggtgtgagccaccacacctggctctttccttcccttggttaaatttattcttaagtattgtaatattttgtaactattgtaaatgggactgctttcttgatttcttcccccctgcaatttcattgttgttgtatagaaatgctactgatttttgtgtattgattttgtatcctgcaactttactgaatttatttatcaagttctgaaagtttttttggtggcgcttttagagttttctatacataagatcatgtcatctgcaaacagaggcattttgacttcctcctttcctatttggatgtctttatttctttcttgtgcctaattgctctctctaggacttcaaaaaacggcaaaaatttgcattacaataaacctataattgtaagttgaaatttgaggagtttgcctcaaacctaaatgctatgaaagctagtttagaaagtcatgtaaaaagctagtacgtaaatgaaggaattatattgtagccgtttaagtgaacccaagactggaaggctgcacagccaacttgttcttcactgctcccttccccactggatcgctgttacttcctgacttgggagtcatttctggctgagctttccctcatctgtgttagatgccactcctttgagttccttcggcacctcatgccttactctgtcatgctctgttgccattgaaatatacctcccctctcctgtaagctccttgagctccaggactgtctttttcatctttgtatcacagtgactggcacagtgactggcatatgtcagtgaataatagataactagttatgaggctctgagttctcaaatctttgacctcgaaagcttttctttcgtataagaaaacaactaatccttgcccctacaatctcagtttacttagcaccctgtcaattggaaattagtgtaatgtgagagggattcagtttggattcctgactgcccttcactggccgtgtggcccttcactagcttgcctgggcaaggcactgtatttgtttttctaggctttagtcttgaatcttctcagtgaaaggtttgagtgggtgatcttcatgttccaatacagctgcaaggctctgtggcctagcagcagagtggagtagtgaaagactagtcacctgacaggcagagcaaagtctgttcctcacccaaccactgagtagcctggtaactcatgcttaccaagtatttgtgcatatctactgtgccttgaagatttgtgtatgtgatgtgccagaggcaaaacaaatgctaacgtaatttagaaacacagatattaagttagttaagtataggtgtaattaggttaaggtaggtataatttgtgttaattatattttaccatattcttatgtgaaaattggttattcacatgtggtatatgggatcattaggatatagcattacgttaatcaagataatgtttctccatttctttgtcttcctggttaataagtgtttaggaaagttatttcttgaaaatgcttgaaatgtagtcaaaaaagtaatttgaattatggtttaatgttggccagtatattttattttgcttcaagaaagtttaataaaaaacattaaaaatgcaaaacaatctcaacaatgtgaacttttacctttttgatactttttgtattcatcatgattgaggattctgacttttgaggtctgtttatttttatatactttcagctcatttagaggcgagttttgaggaggtagagaacaacctgctgcatctggaagacttatgtgggcagtgtgaattagaaagatgcaaacatatgcagtcccagcaactggagaattacaagaaaaataagaggtgagtttgaaaagtttgccacagtattcattccagtctcgaagttttccatattactttacatgctactctttagaagtcccggctgataaaagacaaaggtttcaacataaaactgataaataagctttccaaaactttttttaaaaaccactgtctgttgccatcttttggagatgagttataaaaaactcaggagaaggtaaaacatgaatcccaaatataaagatgaaggagtggagcacagggcaaagttttccagcaaaataggagccctgagctagttttctccaagaggcaaatgactgggttgctcttttcttttcctgctcttctcctccattactagagcagaaggaaaggagcatgagctcaggctgtggaaaggggctggagggcttcaaatctcagctcggtcacacactacctttgagaccttaggcaaattattttatctctcttggcctcaatgtcactgatttatgatgggataatgatgtacccctatcatagagttgttataaggattaaatgaattaattgttacctaattcagttagtgctttgtaaatattagttataataatggctgttatcactaggccaacctgaactggagatggaaaaggagtctaagggtaacagcctgctagactagctctggcatcccaagtcctgcagtggccatctcagagaaggaaggtacagggttggtatttctgaagtccgtggggagtcagtctcagaggacatgagacagactgtcatctgtgctgggcgcctctggaactgaagctggaggcgggctttgctagttgggaggaagcggaagtcatgggattgggtctggctgtggcccaagagcagatttggtggagagaaagatggataggttgggcagagtacactcttggtgttaggagtgttgatgagtggagctgttctggatctaggatgtgacaataacaggagtgggttgctatcatggacaggaggagctggtcactaatataccaccacccccctacccccaatgaagctaatacataggtgaggtggattattgtattgatgttaaaatcttctagaatgaggccaagggatgaggcagaaatgaatagaaatgagtattttagaacacaagttctcaatcagggtcatgtgtccttagagatgggcactaaatgttaatgagccataagagtcacctggggagagtatttaaaatggggattcctgggcttcatccttggggagtccattctaaagttaattccagtggagaaagttgaaatgactccttattccacaagcctctagaatggtttaaatttagaatggtttgaaacaggcattctaggtaattctgatatgggtggcctgtggaccatagtttgagagactgccaggcagggatgggagattgggttgtgtgcaggctgtaaatggaagagcttcagaagagctccagggaggccatggatcaaattgttcacaaaaggttgtatgtgtgcgaattttccagaggtgctttctgtacatttcatttgtcccacaaagattgtaggagggcatttggcagcattaagaatggagtccttggccaggtgcagtggctcacgcctgtaatcctagcattttgggaggccaaggcgggcagatcatgtggtcaggagatcgatactgtgctggctaacacggtgaaaccctgtctctactaaaaatacaaaaaattagccgggtgtggtggcgggcgcctgtagtcccagctactcgggaggctgaggcaggagaatggcatgaacccgggaggcgcagcttgcagtgagccgagatcgcgccactgcactccatcctgggcaacagagcaagactccgtctcaaaaaaaaaaaaaaaaaaaaaaaaaaatggggtccgtgtcaaaaaaggggcatttttttttttttttttttttttttttttgagatggagtttcactgttgttgctcaggctggagtgcaatggcatgatctcggctcactgcaacctccgcctcctgggttaaagcgtttcttctgtctcccgagtagctgggattacaggctcacaccaccacgcccagcaaattttttttatttttagtagagatggagtttcaccgtgttggccaggctggtctcaaacccctgacctctgatgatccactcgcctcagcctcccaaagtgctgggattacaggcgtgagccatcacgcctggcctagagaagggacttttgaatgagtgggtgagccttgtgacccagggcatttccagactgatatgtgggtgtgggaaaagaggaacttcccttaagaggaagatagcagaggtagaaatggtcaggctagtcttcattgttaaatgaaaagttagagagacattctgttgtgaagaagttaggcatggaaatatgtttataatgcaacaagagtttcaaggaacatggtaagaaggcctagaattttgagaggaaatttttgcaggaggttggacagcttgggtacaggtcatgtgaccctagaaggtggttttctcgtgtgtgaaatggggataataatagtacagtacattatagggttttagggaatcagtaaagtgcttggaatagtgcttggcaccagctaagtgctctgtcagtggctgccagctctgactaactcgtattattacttgtgcagctataaagaaatgggtattctatatttttaaatagcccattgctttttagctacataatacaaaaagtatatgaatattgtgatttttctatcaagatatgttgaaatgtgattgttggaaacatatgatagcaatacctcaaagatattgtggattctgttccagtccactgcattctgcagtaaagctagttacatgattttttttttgctttcctagtgcatataaaaattatgtttatacagtatgtagtctattaaatgtgcactagcattatgtcttaaagcacaatgtacataccttaattaaaaatactttattgctgatgatcatcagccttcagtgagttgtaatctttttgatggtggagagtcttgcctctatggtaatggctgctgacttatcaggtggtggttgctgaaggttaagatggctgtggcattatcttaattaaaataagataacaatgaagtttgctacatcgattgactctttcttcctggaaagatttctctgcagcatgcgttgctgtttgacagcatttcacccatagtagaattacttaaaaaattggaatcaatcctctcaaacattgctgctgctttatcaactcagtgtacataacattctatgtcctttcttgtcatttcaaaaatgttcacagcatcttcaccagaagtaggtttcttctcaagaaaccacttcctttgctcatccataggaagtaactcctcatctgtttaagttggatcacgagattgcagtaattcaatcgtatcttcaggcttcacttctaattctagttctcttgctatttctaccacatctgtagctatttccttcacagaaatcttgaacctgtcagagtcatccatgagggttggaatccacttcttcaaaattcttgctaatgtttgatattttgacctcctcacattaattatgaacattcttaatggcatctggaatagttaaccctttccagaggttttcagttgacctagatccgttgaaggaatcattatctatggcagctatagccttacaaattgtatttcttaaataataagacttgaaagttgaaatgactccttattccataggctgcagaatcagtgttgcgttcacaacaatgaaacaacgttgttctccttgttcatctccatgagagctcttgggtgaccaggtgcattgtcaaggagcaatattatttggaaaggaatttgttttttttttctgagcagtaggtctgaacagtaggcttaaagtattcagtaaactatgccacaaacagatatgctttcacccaggctttgttgttacatttatacagcacaggcagagtaaatttagcataattctatggattttcaggatgcctccaaagattttcagagtagtaaatgaggcattggcttcagcttaaaagtcaccagttgtattagtccctaacaagagaatcagactgtcctttgaaggtttgaagccaggcatggacttcctctctctagctatgaaagtcctaggtgtcatcttcttccaataaaagtctattttgtctgttgacaatctgctgtttagcatagccaccttcatcagttatcgtagctagatcttctggataagctgctgcagcttttacatcagcacttgctgcttcaccttgcactttgctgttatggagatgactccttactttaaattccatgaaccaacctctgctagcatcaaacttttccagctttctcacctgttttagctttcatagaactgaagagagttggaaccttgctctggattaggttttaacttaaggaagggaatgttgtggctggtttaatcttctgtccagaccactcagactttctccatataagcaatacggtgggtttgttttcttatcgttcatgtgttcattggagtagcatttttaatttcctttcagagctttccttggcattcacaacctacctaaccattttgtgcaaaaggcctagcttttggcctgtcttggctttcgacatgccttcctcactaagcttgattatttctagcttttgatttcaagtgagagatataagactctttctttcacttgaataattagaggccattgtagggttattattaataattggcctgatttcaatattattgggtctcaggaaatagaggggtccaaggagaggaagagaaattggagaatggctggtcagtggagcagtcagaacacatacaacatttatggggcttgtggcaccccaaaacaatgacaacaatatgtgctggtgtgtaccacagaattctagaagggctcaggaattgaaggcaccaggatcttgaaagataaggtgtgttgaaagcacgtatgtgaagtaagatcccttgatcctccgcttagccaggtgatcaccctatccctagctcatcaggcaatgtggaatttcacctgaggggctccagacttgactctaacacacttgaggacaggtagacatacaaatgtattgaaaacagaggaactaagtgaaagcctacgtagtaaacaataagactgtttaggcccttttccccagtaggtcccagaactccggcagccaaactcacatcccctgtgcggaagaatggagcattcatctgcaaaactgcacttgaccagcccacaagaaaaggcctgcagatatggatatttaggttgtatgtatgtggtgaaacagctaggtctgctcttaccaccctctgatgctgagcccacactctgcataacttcgagtcaacttttgttgcctcactcaaatacaaatagacagctgaggaatcatattcaattaagaaagcttccaaaatgaaaacaactgaaatacgtagactataagctagtaaacaatattgtttaaaacctgcagaagaacgagagactgaggagcagaagaaaacttaaaaacgaggctgggcgtggtggctcacgcctgtactcccagcactttgggaggccaaggtgggtggaacacgaggtcaggagatagagaccagcctggctaacatggtgaaaacctgtctctactaaaaatacaaaaaaatagctgggcatggcagggtgcacctgtaatcccagctactcaggaggctgaggtgggagaattacttgaacccgggaggcggaggttgcagtgagccgagattgcaccactgcactccagcctgggagacagagcaagactgtctcaggaaaaaaaaaaaagaaaaattgtaattagtagcttcagatatatgggaacatcttgtaagagcccattttgtatttatgagacaagaaaagatgctgtagaaaaggaacaagagagagcttttagaagcacatgcaccctataacttaaaagtattaaaaaaaaaaaaagaaggtagcaaaagtagaaaatttcacctgaagcataagataatgttaaacctctaagagaacaaaaagtctgaggaaaaactaagaatgttaagataattcataagtcccatgtttgagtactaggagtttcagaaataaaggagtgagaaggaggagagacaaatttattgaggaaataacataaggaagttgtccagaattgaaggatatgaatgtttgagtttaaaagagcccatgaagtgcccgacaaaatgagtggagaaagatctgttgtcaaatacatatttttgtaaatttcactacactaggaataaagatcataaaagccttcaaaaaaggcttttatattaaggatcaggaatcaaaaggaacatcaacttttcagcaacaatgccgaaagtagaaaatggttactaagaatatttactgggcaaaattttcatcaagcatgaggaaataaagtcatttccaggcagccaagggctccagtgtggtggatgtggacactttgtcaggaagctcctggaggatgtgctccacacacaagggagtaacccaggaggaggaagagcctgcacagagcagagatgagtcactccaggaggattcattctgttcagaagagacaccaagggaatttctagggaggtggtgagaagcttcagcaatcctagagagcaattcatattgggacaggaaggccttctggagaattctaagtagtgtttccaagggggaaaaaatgaagctaatgcattgtcttatcggcgtggcaatattgagaggagctttatgactcctttatttatttatttatttatttataacttgaattattaaactctggtggagggtttaatgaggaattagagataaatgtgtgtgtttttttttaaaccaagcaaacaacaacaaggtagatattaacactgaggggaaacagtttttaaaaaagagaaataatatgctacatggctcagtcacaaacagtatttatgtgatattggaataattaaaagcagaattgtgataaaacttgctggggagatgggggagaaaaagcatatttgtgttgaggggaattagaggtgtaaaatagctaatcctcatcttctccagcaggaaatcaagaagtaatatttaaaattgaaaaaagaataaatattaatatttgcatattatttagaaataacagaggtaaatgccaggaaaaataactgaaagaattgaacatggctgcttgtgaaaaacagggcagaaaggtggagagagctggggcagggactacttgtcttcactataaatacatctcctgggtgctctttgacttcaggaatgggtatgtactatcaacatgcaaaaattgaattaaacattttttaattaattccatataacattccctgaattcttctgcatggaatactagactgaaaaggttgccattgataaaacagtatgtgatcagataagctccagaaacactttgcatttgcccacggagctttgcagtgtgcatcagcgtgctaaaggttctgagaattcctgtggtaaagaaatgttttgctgggcacggtggctcacacctataatcccaggactttgggaggctgaggcgggcagatcatgtgaggtcaggagtttgagaccagcctggccaacatggtgaaaccccatctctactaaaaatataaaaattagctgggcatggtgttgcatgcctataatcccagctacttgggaggctgaggcaggagaatcccttgaactccggaggtggaggttgcagtgagccaagatcgtgccactgcactccagtctgggcaacagagtgagactctgtctcaaaaaaacaaagaaatattttggccgggcacagtggctcatgcctgtaatcccagccgaaagcggcagatcacttgaagtcaggagttcgagaccagccgggccaacatggtgaaaccctgtctccactaaaaatacaaaaattagctggatgtggtagtgggtgcctgtaatcccagacactcaagaggctaaggcaggagaattgcttgaacccaggaccgggaggttgcagtgagctgagctcacaccactgcactccagcctgggttacagagtgagactctgtctcaaaaaaaaaaaaaaaaaatttttttttgactcagcatttcacaacttacttgctcacagaatcaatttgcatgtaacacatattaacattctgtgacttagtattctacataacaccatttgagaaattttcaaatactgccagtgaaaaacttttaattttctggttcataagagatgagtcgcttaaaaataaaccttcttcctttttaacaagatgctatgcaaactacactaatgacttttcttactctgaagaaaacgataatatgtgatagaaaaagttggatatgtgatatgcttatgtgcatgcatttttttaacaatgtttgcacaccctgtagctttcccaaaaatccgggccagaacactggatgaaggtggggagagtgggagaatgaaagataatttttcacactcctccagtgctaataggctctgcaataggctcctatggcttttctcattcagctcccaccagagcctgtagtgtgggcagggcagcaatttttggagttgagaaggagattgagttgcattaagtcatcagactatttaggggccagcatcagaaccagagtcttcagtccaaggctcccaccacaccaccacaccaacccaaatgtgtcttcttttttgatgttaagttggaacaaactgattgagtcccagatgtttataccagtgcatctgtagtttcaaatggatatatgatattttgtcattcatttgacggacgttcccagcagagagaatacattcctgcccctacaaaaacaggactgtgacccattataaaataaataaacacaaaataaaataaacgtgacagtggcttcctagtcaggggattctcccagtgggtagggaaatatacagcctagggatggttctgatagctcttacctacccttgagaaacatttgaatagacggtttaatccacttcatttgtgcagtaaagtaggacatctctctttagctagttatctgagaaaagtgccatctaagacacttgtgtggttgtacggggaaaatacccataaattgcttttctaaatatttttctgcatgtaaaatgatattactgttaccagtgcctttgtagactggaacggacattgccttgataaacaacaaaacattgtgtagtggctagaatatggctataggcaaagacaggtactcaaaccagtagctaagttgtcagatagttcagaagatgagtgctacagccatacgagtctaattcatggacccctggcagaagcttttgtaaccaataggaaatacatttttcgtaaagaaagaagagctaatatttagtataggagccaaaataaagaacttaaaaccatttacatggatttttctagctagcaattagaaaagtgggcttgagatttgagggtcagcttatattcttaggggtgtggaggaagacagatgataaatttataaagaaaaaaagaataatttcagacaataatataaacctcaaaggaaataaaatggagtaatggtatagtggtaaggcaggggaggactgcttcagctagggtgagcaggacaggctcttctgagaagatatgtgagaagaggtttgagtaagatggcagtcatatgaggatctaggactgtatagctccaaacagaaggaacagtgggaacaaagaccccgagtcatgaacagtaggtacgtttagagatagagctaaatggaagtatagaatctcaaccttctagatttttaatctttccagtgccaccataatccttagagtgcttattgaagttctctcacaataattagttatacttgaaatcatccataagtgtgtaatttgattaaaatatttcttatttccaagtttctagatcccttatgcatctccttcagtacttatgctttccccttcagtacacagcataccatcagaatttctccaaaaatagtaacatcttgaagaacagtgattttagcaattcttgttaattataagtgactcataattttaacatagtcttctgttggactcgaaacctgcttaggggcatactgactccagaaacatttttcactgatttatccagactttgaaatttgcttgtctcctggaacccacctcctagaagtggtggtcgctgctgcctctgatgagatttagtgcttatgcatattttaagggtcctgattctttttgctttatgtttatatatctactatagttaatgccaagggactctgcccttctttttgtttgtgtttttttgttttgttttttggtaacatttggactatggactatatttagaaaatctttagaacaaagtataacagatatatttaagagattatggcgtatctgtagtggcgtttgaccagtgtatgttctagagactaacttgccaaattcctgagcttcaagaaatgagtgttcaagctcacctgccaagagactggcaagctggggagaaggggaggtgtggcaggagtgtggccctcaggcctggctttgcggagctgagaatgggagagaagaaaccaacagcattctccagggtaaagatccaaaaacgatctcttttggttcttctggaaccaaaagagaagatcgagagcaccttctctgaaggagccaagcagcagggcagtaactagcttctgcagttctgcagcagaagtctgtttggatgctgaatgaaaaggggagcaggagaacttttccgcaggcaatgactttacaaaaagggagcagacttctgcatccaccaggatggagtaacagggaccagatttattctctcccccgaaacaatgaaaaaccaggtgaaataaatgagagaatgtttttaagacactggattttggacaaagaagagatgtgatggtacccgatagataggaaacaagtgaggtgagccctgtgattgcctctgcatcctgcctagagagagtttccagggtgcactgcagggaagtggacccaggcagagcctggcagactcagagttgaagagctaaatctggggagatcaaggcagctggagtttacaggacatagtcccagagaggagagagtttctgagagggtctccatgaatattcacctgataatacaggtgaggaaactatccaaggcaggagggaaaaaaatatccaagagggtgagctaacagtgcctggcactcacacagagcctcttcccaatagtcggactgggaaaactcataattactgaggtattgggaagtggactcggtgaattcttgcctcagtaggatgtgtaattggcttttgtctgaatactgctgaagacgtgcttagcaaatcataaagcaagcatcagaagaatcaagctgtttccaagtaaattaactgtataacaaacaaagctcaagagtatttataggaatataaaaatacctagcaccaaacaagataaatcacaatgtctggtatctaatcaaagattactaggaaaacatatggaggaagatagtcaatcaaagccattaaaaactgacacagatattagaattagaagacaaggacagtaaaaattgttattgtaactgtattctgttcaaaaagtgaagtagagacatggaaaatataaaaaaggctgaaacttgtatctcttttctccattttctccttttactcccccctctccctattagatgctagattttagatggttcccaggtggttaattgaaagtaaattgacatttttattttattgtatttattataatgtaatcacatttactaggccaatgacctcttgaaaacagactgagagctatgaatttgttggcttcataaatgtgtaatcacaccttacattttcttttaaaattaaacctaagcttatgagttggcaaggaattgaacttaacaaaatttttgctctaaagtgtctgttagagaataaatcttggcagtttcagactttatgtgtagtcacgagaacagatgtagctagaatatttaacagtttattagatccttgggttgacagtaaatagagtttaggactgatatttaagttcataaagctttattttgaacaatgagtatctgtttgccatttttaaataataaatgtctctctaactggtttacaaaattcttttcgttatctctttcctccagttatgcaaatgacacgctggggttcaagctttttgtttttaagaggcatgaaaacctaaagtgtatctttgaggtggagaggagcagagactaaagatatagcaatctcgagaaaagttttttgaaattaagcaaagcaaaattattattatcctgggttgaaaagtaggtaatccttttttccaaagttagattgattatagtttgtacattataatttagagtctgtaataactttcagtgttttagaattcatttattacatttggaataatattttatgttttttatgacccatagttgtgttggagtttatgttccatcagttactgtgtttttcaaagatactttcaaaagtataaaatttatcagttattttagtcttcagttgaatgtagctaaaaccatgatattaccctatgcttttctcacttttctggttttcttgacggatatgagagctgggacaggcagaggcacacctggcagcctgccatacctgctctgacatcggtggtaagcaagaaccatggtgaagtcagcaacaagaaaacagtgctcctcctctctgctgcagcccttctctaccctctctgggcagtgctctagcatggctgtgttggccccgttttttctatggctaagaagcaggtctctttttcttgcctgccttttactattactagtctttcattctggctcagaaaaaaaaatggcactataattgtttcaaaggaattgaaacaattgctactggagatagttttttgttttgttttgttttgttttcagacagggttttggtatattgctcaagaggtcctcctgcctcagcctcccaagtagctgggattacaggtttgaattattgtgcccggctaatgctactggagaggtttgatactggatttcaaagagggacattttcccccaaagatagcaacattttccttcctctctggaagtttcatgttatgttctgtttaggaccctttttttttttttctttttctttttttattttgagatggaattttgctcttgttgtccaggctggagtgcaatggcgtgatctcagctcaccacaacctctgcctccaggtccaagtgattctcctgcctcagcctcctgagaagctggaattacaggcatgcgccaccacacctggctaatttttttttttttttagtagagacggggtttctccatcttggtcaggctggtcttgaacccccgacctcaggtgatccatctgcctcggcctaggaccaattcttattataactgatatcagagaagtgcattattgtcatataaaataacacgttacttttgaggcagagaaaatagaagttacagttcttaaggattaattcaggtagatttgagaatttattagttgatcccaatatttttgctgtacatgggtttttaaaagctaaaaagtatcctttaaaattcttaacattggactagtttggggaaagttaaaacacgattttacctcataatgaacttttaagaatatttcttaattaaaatgaatgggcaaggtacatggcataccacagttaaaatattgtcgaaaaagaaagattgcatcaacattgtataatatgaaaacattgttagagaacaaatccatgattcatttgaagtgtttaacctatgtttttcttagctttttaagtaactaaggtccttgacaaatcaatctttatttacctgacttgatactgtcctctcttgacttcaacaccagtatcccagatgttcttctctgcctcaggttcattttagttttctttgtaaatgttttaatgctggtgttcacttgtgctctggtcttggttgttgcctcctctcattctgcagaccctccttgggcatgctcttctacatccttggctcatctgccagccataaggtgatcattatcaaaccactgtattcagtgcaggtctctcttcttacctgcagaaccagttgccacctacacagctattcctggacttctcaacagcaccatgcccaaaattgtcttccacagcaaaacctgacctttttctgttctaataagataccatcactacagatttatccaggccacaaatatgggagtcttcataatctcctccttcctctcctaccacctgctcagttctcagtccagcccaatatttcctgactctgtccttgcctttctgtcttcactgatcctttccggagttctagcccacgtctttgtagcctgagttacactaatagcctcttaattagtcttgctgtctgtagtcttgtgtcccttcatttatattactgttagagtgctcattttttcccaaatgtagatattaagatttctgatcgtcaagataaaaaaaattaaatgatgatggtgactatagcagtagcctttattgaacacttaatatgtaccagacactgcttaaaaactccaaattaactcatggaagtctcacaatgaccatttgagtaggtgtactctcttctctaccaataagaaaagagagactaggggagataaaacaacttgtcaggagttggaagtagcggtgctgggccagaaccaatgttttcctgacttcaaagtctcctcatatctttgatagtaaactgcctccacacaaagccatctgtactctgtgcttgggtgccatggagtatggaaaggaccttgcttctctgcgtgtatggactgctgtgggtgactcaatgtaaggatggattgagattttagggcctggtgccgcttgatcaggaatatatttgtatgtgggatgcatgagtttaaaaaaaaaaaatccaccttctaccctatcagctataaatggcaacaagcctgtaaggatatacagtttcaagtggtggggcatgactgcagacagctaataaatgacaaaccattgatttggtgataattaatggtaggatggctctttaaggaattggctagccactaagaattttgaataaaaaaatcagtaacacaaaggtgatataaattttttaaatttgtaataaaaatttaaatttaaatttgtaataaagatttttagccaattagttgctgtggactagtcattaaacactagtacaccagtgaaaataaaagtgttttttgcaggcttatttttgaaaaccacgacatgtcttcagggctatgttggggattttacctcatgcatacatcaacgatcctggctttcaacgttagtttttattagtttcctaaaaataatgtactttccccaagctaggtagacccagatgttgcctggatgttttggggtggctctgagtttcacatatctgactctggaattctgtagatttagtgatctacttaagtaactttctgttagggctaaacttgacccttgaactgtattctggatgctgaagatgatacacatgcagagtcagctgtgggttttattcccagttctgtcacttactatctgtgtggccttccatcctcaagccccattttcctcatgtattaagtgagggtgatgatacctacagttaggtaattacaagttataggagacagtatgtgtaaagtgccttgcatattgtggagtatacagtaggaactcaataaatatcccttacccctgtctcatctttccttatcctacttgcttcaacctctctttatccaggcatggcttctaaatcaaatagattttcatgtaaaataggtttagggaaatgattcttgcaaggtgggatggaatgtaatccatgtataacttagtgctgccaacctgcgtagaccttcattatcttttttggaatccatttttcttaaattccaggctttgttaccatatccttcagatccttttcaactttaaattccaagattttggaatcttatcatcttgttactttcttggctgtatttgcccaaaatagatatatacaatttatattaatagcataataaataaggatataatgccatttttacagtgaactggctgctttttaagaggttttattttaaagataatgttgagaatgtcttgctggttttgtataagaataaatgacaacagagacttttaaggtatagagagtcctgagaaaattcatctcaagctggaaggaggtccctcccaccacccacccccaatccccctcaaccccaccaagcctgtagggtggcaccacaggactgtggactgccggaaaacaacagacctctgacttgttggtgatgaatggtagatgcttctttcttgagagtgggcctgtgagatctttcccaggaacaagtagtcacagtaataggttctgtccatcagccataacaaagggacactgttcaggaatgttctataaaagagtattgctgatcatgcttaaaaaaaatttcccctaaacatttctacacatgaagaaaaatgttagggtgcaatttgcagttggtgttttgaatgtggtattttgtgttagccttttatcatggatttgtcctagggaggcagtttaggatttagagagagtttgctttatctgtgtttatggaggcatttatccagtagcttctgtctattaagttttcatcttcagtctgagctagttgatttctactcatatatatagatttaatatacttcttgtaacattccataggcttattaatgtgattctttctttcatttttattctttataactcaatccctggagagaaaatgattaaataatagcagtttcaccctttggaatattattagcttttgatcctgctgttattttttgaatgttttagttttagggttatgctaaattttgtaaaggcattagctgaattgagtaaattttgaaatatgttaacatttaaaatgagacatttcaattttttgtttgatcttctgaaaatactattaaactatggaaataaactcaatttttagaaaatgcaagcaacaaacaagttgtttcaaatgagataatatttgatcaaactttatcaaaaataaaatctatattttattacagcaatggcctctttgaagaagcagatcttagtcatcctgcagcctcagtacttggtaatcatgatttgctgagtgtctgttgggtccaactctgggcacgcatgtgatgcaggatggaagagatgcagtctctgcacttcaggaactgtagagacgatacctgtatgaacagaaccacattacaaggcagcacatgaaatgtataatattgatagagtttagtgctacagaatttttgataaaggagagatcactgattggatgtcaatgaagtcttcttggaaaagatgaacttgaaggctgttttacactaattattattattagcatttttatgctaataacacagtttgaaggagagtgactggaacttaaaactcctgcttacccatgctttttcatctggttagctgagagtatgtcttaatgcttaagagtaaaatatctgccatgttctcgataaatgttgcccatcatcatcagttatactgtccttgaaaatgcatcagctcagtccttgcttctccaggaggcctttcctaccaaacctaagtgtatgagttgtcctctcttctttattcctagagaatcctcagcatgtcattaccaaagcactataatctatgacattgatttctaattattgctttatttctctgtctctcccactaaagttccttgaggttatggaacatgtctattccaaacctagcattattcctaatgctattcctaacattatcatagtgtctaaggcttagtaaatttttgttgaatgaatgattgaactcaaccaagattatatttagtatacgaaaatggatatttatataaggttgatggcagtgacgatggagagaagtggatcaattcaggctatcttttgagatggaattgacaggatttattgatgaattggatggagaatgagggagatggatgagccaaaacttgaggagccgggtaatgccattaactgagatgacgtcgactggagaagaacaggctgtcttgcaaatgtttgagtagcctactccacttttgcataaagctatcaaatgggcagttgcatatgagtctggagctcaaagaagagatcaagacaggaaatgtaatcaggaagttagtagcatatggatggcatttaaagctagggatgaaattggcttatgagcgaatgtaagctgaggagagaagagggcccagaaccaagcctgcagcactccagcatctggtggtctggaagggatggagacaatagcaaaagaaactgaggaggtgggagaacactagagggaactgtttcaagaaaccaccagttgggtcaaatgctgcttaaggattaggatgaaaacagagaagtggtctctggatttggcaacatgatgattgttggtggtgttgattgtgtaatggggggtccagaagccaaattggaatgggttcaagagtgaatgcgaagcgagggagtaggaatctgtaggagttaaatcctcgagtaggctgaaggggatgggaatcctgtctgcagctttcagtcttcctgtttcagcaatttccaaaccgaactcatgcattgccctccaaaatcttttccttcttatgatccagactagaactgccccggttagcatgcttgtctccttcctctccttaccccattgagtcagatgccttgggctgttgagtcttctttatgatacttttcaaattggaatccttcatttcattgtcattaccacttaacattgctcttgccaagtattaattagctcttccccacgtgcccccaacgtgagtttcctgtgtactcactgcttttattctctcccttgccagtatatccatccatcacagctagaacgttcttcctaaaatacagctttgctcatgttattctcctgctaaaaataaaacaaaatattttagcctggcactgagaactctctacctttttatctgaattactttctcttcattcagcctgctgttctgaagtatttgctccaggacaagtacttgctgaagtattgctgttctgaagtctgtttcctaaatataacctgcgtcgtctttggcctctgtgacctcacagtcactgctgcctgtgactgacatgcctttccctgccttctcttacattttctatatttccaaatgctgagtacctctaacagatggtggagtacaccctaacaattgtgaaatttcaaggctttcagtgctgctgctttacctcatcagttccttaaaagttccataatactggttgggcacgatgactcatgcctgtaatcccaggactttgggaggccgaggcaggtggatcaactgaggtcaggagtttgaggccagtctggccaacatggtgaaaccccatctctactaaaaatacaaaaattagccaggcatgtggtggtgggtggctgtaatcccagctactcgggaggctgaggcaggagaattgcttgaacccgggaggcagaggttgcagtgagccaagatcacaccgctgcactccagcctgggtgacagagcaagactctgtctcaaaaaaaaaaaaaaaaaaaaaaaaaaaaaaaagttgcataatactgatttttttctttaaaccaattatttgtaccaccactacttcaagcagtcatctgttttaggaattgggtacaggaatgattttctgaagggaagtttcctggaaatttcgctgacagttgtggagttgtgggtcatgacgctgtgtgacagaggatgcccagaagatgctgggcttgtcctcttcacagcagcagacagacggttgcagggtgagcaggatgagtccacaggaaaaccgccctcctcaattgcacactcactcattaatgtatttaatagtagttgctggattccttgtttttatggttgttagtatttgggggtaggagaataacagtgtctgtgaaatcattattctgagtttcagctttttaaaacaagagagccctttagaaattctgctcacagtcacacattctaaaagaagaaaattagaagctctctaaacattgtaatcatagaaaaaaaaaaagaattactcattagaatattgaactgagtgttctgtcaactttccccacgtcggggaattgctaatgtgaggatgtcactaagaagtagattgaagatatctttttgagattctcttgtgatacatattgccttcctgttgtattctggtttttattatcggggtataaagcaggttttaggcatatttagcttgtacctagctaagcttttaagaatgaagttgattattgactgaagggaaacaattacacaggttttgtttttgtttttttgttttgtttcgttttttttttttttgagacagagtctcgctctgtcacccaggctggagtgcagtggtacgatcttggcttgttgctaactgtgcttcctgggttgaagtgattctcctgcctcagcctccctagtagctgggattgcaggtgcccaccaccacacccggctaatttttttgtatttttagtagagacggggtttcaccatgttggccaggctgatctcgaactcctgacctcaggtgatccacctgcctcagcctcccaaagtgctgggattacaggcatgagccaccacgcccagccacacaggtttttgaaaaaataggattgaaaattcttgcatagtttatgaaccatggtgctggataattattataagtagatattgttaggaaaaaacggagtgggatgaccatctgatttaagaaccttcactttggctgttgcaagaacattatctacttggcctttcagtaggcagcttgccagtctcttctagcagctgttgagtgtagtcagctattttggaacatgaggggtattgtaattaggtgtgtagaaaattgatttaagaattcaaaacatctctagatttttagtaaaacctggactgcaagtacaaaataaatgtctcatattttaactgggataaccagcctttatttcctcaaaattactcattagtactgataatgaggaaaaaaaatacgtaactgcaaaattgtgagggaaagcctcaaaacaacttgctttgctttctttgtcacaaaatgtttattttaatctatgtttccccactgtacacttcccaggaaactttgtgttttggcatccttacttaatattgacaaaataataaaccagaagattcctagaggcttggccctttgtggcatgagctgtgcacctcaatcctttgatatgcactttcccccttttctcttttgctgttgaaagggaaaacaactgcttctattttggataattcttaactaacgatctcaaaaatccagtattgaatatttatccatcaaggaaaaattgtgttaagtgctttttataaactgattcttacatgtatgagatggttcatagctgggattaaaatgctgtctgtgttcttataattgttttattgtttagatgaaattgtttagattattatttggattctggtggaacttttttgagccattaatagaaaatagcagaaataactgaaaatagttggtttaggctcattgtactggtcatttcagtaaagtataactgatatgtgaagatccagaaataccactgtgggcatttaaagtacataagtttttattatgatggaagaacagttttcattggggagatttttaatttgcattgtcttgtcttttttttttttttcctacaggaaggaacttgaaaccttcaaaggtaattttgtgttaattcttcactttaaagtagttgagagttcattggtatcagatgttctctcgacaatgatgaacaaactcattttttaaaatcagtttacataaaacagtaaaacttaatactgttttttgtaggttttgcttaatcacaggtggttttgatattctctttagcacatgtaccaagtgagagttcctgctaatgacctttataagtggtgtgttaggaaggtgcagtgctaactttgaggttgttgagaatcatagtttaagaagattctggtttctcttgtacagtctgggccatgtggaaagggaatggtgacaaagatcaagaggtgcccctgtaattgaccttgcagtcactcgaacctcctgagaggtcttcagtgctgggccctgctctgctgctgtcttgtgactttggatgagtctcttaccttttcaggcacagtttctctctccatctgtaaaattagaggctcagatgaaatatattctgagattccaaaagcacccagcattactttttacttttagggaatgcctgaaggagggacgctagagaataattcttggttatgttgacccttactggtcatggagaaacactagtgaaaaacagaaaaaaacacaaactttccagcagctcaaggttcttccagtttcccatttttcaattaattactcatgagcaattaagtagtagaaatcctattctcgagagattcatttcaataactgagaaaactttttgaattacttattaaatcacttctgattttgttgttttatgcttattatacttcacgtataaaccagcattgtcctttagatttaccgaatggttaaagatttccaagtatatcatttatggttgaattgtttatatgtgtgatctgtttggatttagaaaaaatgacaaattctcaagataaaaggtataaaggcatattcctcctatagctattattgaacagctttgtttggctggatttctgtttgacctactacggctctagtaaatgattaagttcatggccagtttgttgaaggtaatgttaaatgatcatgtgatacaatgtgttgtcatggctgtcattgttcttaattcaatttgtaaaccactacttgtatacattcttttttcaatcagtggtttaaaataagatttgaaatccttataaaatgccttttccttctcattcttttcttttggttgactagtttagtatcttcttatataacagtaagagatgaaaaaaacaatcaagttaatattaaaagacagggcagggacacagattatgtaaaatgtcagttttacttgcatctcagtgctgaggcgtactttttttagtgtgacaatattcagagaaaaagaagagaatagcagtttgcaaaaggttaggtagtgttgtatattacccgatagaataattcaatttaggctgaaatatcttgtttatacacacattcctaattatgtacaattaacagcacatcaaatccacccacagtccaattaaagatctcaaatatgaacaaaccctaaattgaatgttgcattatatctagatttttattatcagtgttcattcaaaattgtttcttcttgagtgttttgctaatatttttaaaacgtggcctgggcatggtagctcacgcctgtaatcccagcactttggaagggcctcctttgggaggccgagggggatcacctgaggtcaggagttcaagaccagcctggccaacatggtgaaaccccatctctactaaaaattcaaaaactagtcaggcgtggtggtacccccagctactcaggaggctaaggcaggagaatcgcttgaacctgggaggtggaggttgcagtgagccaagattatgccactgcactccagcctgtgccacagaatgagactcttgtctcaaaaaaaaaaaaaaaagtaccctataacaagaaaaacagaaatttaatagctcttccaaagtattagtgaagaaaaaaagttgtaaaagtttgttcgaacatattgtggcaatttattattttttgaatattgcctttttccttttcaggttgcaggaaaataaaaggtgttacttcctccaattgctttattcaacttatatttagaagctcttttctaaattgggggaaaactaacttttgagaaccaaaataccaaattagtaaccctcaaagttagtaatgtagattaatatcatccaccatgttctggattctcccttctaatactccattgaggttgatgagttacgttcaccttctggtgcatatggccaatctctacaagattattgaaaccagttgttgttcttattttaatattggcagtaggaaatttttctgtgttccccaaatactgcattcatttaaaatttttagtgacatcactcaaatattagacagcagaaaaagaggataggatcataaaagtccttattttatatttttaatggggaaggaattccattattgtaagcacatgtagagtacataagctttcatagtctttaaagacataagacattgaagacttagctctggaaagcagagccagtggatgaggtaggacaaaagtggtcagagaaacaggaagactaaggcaacgtagtgacaaaaaaactacagaggagagtttaaaggaggaaaggtggttatccataatataagtaatgcagagaagttgagctgaatggagagagcctgttggatttgacaatgaacaggtcattggtgacctgaaagagctgtttgtaaaggttgaatccgaattgaaaatcagaagtgtatgaataggccgggcatggtggctcacgcctgtaatcctagcactttggaaggctgaggcaagcggatcacttgaggtcaggcattcgagaacaacctggccagcatggtgaaaccccatctctactaaaaatacaaaaaattagcccagcgtggtggtgggcgcctatagtcccagctacttgggaggctggggcatgagaattgcttgaacctgggaggcagaggctgcagtgagtgagccaagattgtgccactgcactccagccttggcaacagagtaagactctgtctccaaaaaaagaagtgtatgagtagttaggaaataaaggtgacatgaactaactattcaatcatgaatggtagaaaaaaatgaaaatgtaatgagatgggatccgggtcaaagtcaggggaggtatagttgaagatattgaaggagtcattatgataccaaagaaaatggaaagaagtggtatccagataggttatccttggagagtatccagggatgtctcttttcctaagaccttagagaaggaaaggatggctgataatatagggaaaagttgacatggaaggattaaataattttttgagaattcacgtaaggaatgataatctgaattttcagggctaggctcagaagcagaaataaaaaagcaaaacaaatatgctttggttaacacagagttggaaatgggaagacatgtaagatgggccagcaggcatggtaaccatggatgctagtgagactatgattgaaatgattggctgtggagttctgactagagagaggggaggcctgaccagaccagcagaataagcaggctgaatggtacaggtgaggtaccccgtaaaggggaagaacacttttagtggttgaggtggatcttgtggtcaaagaagagatttcagtttgaaatcttagaaggggagcaattcccagtgatgatgatggctaaatttgagtaaaaatagaaggcaccaagtcatctgacttggagacttctgaggctgtgaggagtctcacttgtttggatgactcgtggatgtggcttatgcatattactggcttggcagcccttagcatgttacagatagggatgatgatgctaggtggtaaacttcagtagaatttgttggttcacttcaagagttggcttaacgtgtgagacaaaactattcagctgccattgaacaatacttaagtgactcaggttggatgatgttactgtcctctgtcctcagggagctaaaggactgtggcaaagcttatagattagaaaggcaaatatataatttgaatataatatagaaataatagaaataagtacactaaggtgggagtaattaaccagagagaggtcatgacacttgatctgaatgacgagtactcactgggctagaaaggataacaaagacattccaggaagaggaaagaacagttgtaaagatgcatatatgtttatttcaagaatacaagttaaaatttaatttcttatttattgaaggagccacaaataatttgcctggctgaagcatatggtgtgtggggtgaagtgatgagggatgaagttggacagagaggcaaggaacaactggtacccagccttgaatgccatacacaggaacttggacatttccctttaggccagtggtcttcaaagaggaatgtgggcatgcagagcattaggaggagagaggaaactggaatttttgtttttttatgtcatccttttaaatgtcaattttctgtatattatgtaataaattagagcaggaattcatgcatatgtcaggggtgcatgattaaaaagagctcaaaggttattgtagctgatagagtccggatagggagtaggatattcccaagggtttcaatcagggtagaaggatcagatttgcattttaaagcaagttttctggaatcatataggagatagattagagaagatcaggtctagactaaaaaagatcagttgggaaactattagatttgaattcagccattgctagaatggagggaaagacacagattcaggaaactgagtagaataaaaagtcactatattgttcctttttattgctgaattaatatttcattgtatgaatataccccattttgtttatccactcagcagctgatggacatttggattgtttccaggttttgcctattttgaataatgctgccatcaactttcttatgcaagtctttgtgttgacatacatttttatttatcttgggtatatagctaagactagaatatatggattgtatgacaagtttgtgtttaactttttgagaaactgctgaactgttttctaaaatggctgtaccattttacgttcctatcagcagtgtgtgagggctgcagtttctcctcatccttgacaacactagttagctcttacatttaggtctgtgatccattttcagttaagccttgtgttcgtgtgagttaaaagtctaccttcatttttttacgtatcgatattcagttgtctcagaaccattttttggcagaccttggggctctaggctgcaccatgcccgaagtctccctcacaagccttagaactattttttgaaaagagcttcttttccccattgaattgctttggcacctttgtaggaaaccagtgaccataatgtaagagtttttttctgaactctcaactttgttccttattgccagtgccacactgccttgactagtgtagcttcgtagtaagatttgaaattgggacgtctaagtcctccaacctactactttttaaaattggtttgactatttaatatttaaggtccttcgtcttttcatataaattttaggatcattttgacaattctaacaaaggaaagagcctactgagacttgaatagggatggttgtgttgcatgtatagatcaatttggggaaaattgtcatcttaatgatagtgagtctttcaatccatgaacatggaatgtatccatgtttgtttaagccatcttcagtttttctaagcagttttgttgttttcaatatgtgagtcttaaatttattccttaatatttcattcttattgagtgaatttcaccatgagcatgttaaatttgcagtatctgtaagacattataggtggaagtgtccaatgggctgttgaacctcaggagaaggatctgagctagatttgagagtagccagcatgtaggtgggaatggaagcccggggtttggatgacgttgcccacaaacaacagggcagaatgaaaaaaagttgacaatgcatagaaatctaggaagcaccaacattcaccagacaggcacgagaagagagctagttgcccatagtggaggcaaagaggaaaatgtgataaggagaacatttcaaggacatgtcaagaagcagtgtcatattgttgtggagaaggcaaactgaaatatagcctgagaagctaattggtgatcttaatgaggacactttcagcagcatgggtttgtgtgtgggggtgctgggggtagaaaccagatggcagaggattggaatgagtggactgttctgccttgttcaccattgtgactcaggtgcttggcactttggtgcttattaaatatttaaatgaatgagggagtagagacaatgctttcaaaagctaaggctaaaggaaggaaagaagaatagttagaggagagagttaggttgaagggaggatttttttttttaattttgggaggaagttgagtatatttgtatgaaaaaggaacagaagctatagagagggagaggttgaagatacagtgagagtggctgattgatggagctgtgattcagaggggaccagcgggagtgggatttagaccatactattttcaaaaaggaaaaatttgtggagaagtgtttgtaactattagaattgatgacttaagatacttattaaaaatatatagcacattccaagccactggttagtgttgctgaatttgaaaaaacctttaggctaatgctacattaaaaatgaggtaggggaaaattatagatgccttgtgtgttatgaaatgaactatatttttaatttttatgttactactttcaaacagcaagatttcatctctcttttgctgtgttactaaagcatctttgtacctagatgacaaattctgttggatttagttattttcagccttccctcccctccattttgagctgcatttggtatggtcccagaccggtgcatacatctttgcacactagagcccctgagagcttgcattttgcttttatagaggcagtagattccaatgtatatctgcttaagccatcagcaaaaaactaataggcttactacaatttctttggaaaaacctgcttctggcttcagcctcacttcctttgttctacatcccagaagatgcacgtgagggcagctgcctggtaactggaggcttcacttgaccagcactgagcttctgttcactccttcaggtctcacatccatgtcatctccaggactcaccgaaaatagtcagagggatccctgtaggtggaactttattttctgtttttcctttgctgctttcctttgaaatgtttatttccatgcctggatacattgctgtatttgcatggtatgcagatgatatattattaaaaagcagaaattaaatttcaacttgacttgaacctacaagtagtacatttttatgagagcattattagttctttctattaccaacaagtaataattactaaattaatacctaaaataagtttaaaatgttgcatggaaatgtaggacttttttttttttttacaatatgtgtcttttcatgcatcaggtgaaattaatcaaactgacattttttatgaagcaatatttgtattaaaagataaatataaaataccaggaaaataatactagctatttgaataatgaggctggtacagctccataaaactaattcggcatcccttgctgctagtatgttcattttccaagaggcagttaatagagttaaatatgtgagccatatccaaagatagtataaagttaaaattcattctatggtactatatggatttatctaaaatggctgattttcaatatggattttgaaaaatgtcataatgcttcatacaggttgaatatatatatatatatatatatatatatatatatatatatatatatattcttttcataatttcatataacttcagtgtattccttatctgttagccagaggctgtggttttaatgacatctctgtgtggtatttatatatatatataaatacatatataaggatattgaagttgtggaacttactgcaaaaaatacctgaaaaattaactgtgcattttttgttgagtaatttattgtactatccatgggggtggtaactgaggaataatttttaatagtgattgcattttttaaaactccctgttatttcttttagttggcatacgttatggcatgttatatacatcatgccttgtcaggtagaagccacttctctgtaaatgaaaaaaaaaaaaaaaaaaaaaaagaaatacatgttgtctctcatctatcaaggttattctctttttaatattacaaatttgaataaggtatatcaaacttaagagaaaagttccttctttgtgtccctctctcacgcctgtgtatgtataacatagcaaaacctttcaagcttagatagacatattaacagaagtaaaatgatagctcaggaattcattataaaattggagcattaatggaatcaaattctaactagaggttttaccacattcttattcattattaagtgttcaggaaaaaacttatcagtgagaactttggcatttatttttaaagtatttacttatagggaatgtatgataaatgacatattttctcttctctcagtcattatcttaaataatggttctaagagtaaagatctgcatataggtataatctgatattcaattttaatattttagatcattcatctaagaaattgctccttgaaaatcatgatttgttggtaaatactggcaagatttttgaggtgtctgctcatctttttctcatatgtcaatatatgttaagtgtatattcgtttttttaaaagctggcttatatttatgtaacagtgtttaaataaagttagtatctatatcctgtaataccaaaatatttatatcctgtttgttaattttggctctaagacagtttatttctaagacggagttgattgtttattctaataccatgtcttaagttgtcatactgggcatgacctgaaattctctaagacgatgttctatattgaaggggaattggcactttaacagcttgtttaggtattaaactacataaaaatagagcatcaagattagggttgtgatgcttaaatgttacttttctgggatttcttgtaatgatcatataccaccattgtatgatcaataattatagcaatagagtattttagaagtgaatcaggacaacgttttgttgtctatcataaatgtttggtatcatgaataaatacagctattctgtttcattacctttttgctggaacatggtataacttgacagcaaaaattatacctttcagaaaactaaattttaaaaccacaaaaagaaatctttgaaaattttagctgtcagccttaacaagagactttgtctgttgaattcatatggagcttcatgattttgtcttagctttttagaggtgtgtgctggaaaataacctgtgggatcttgtagctctgctgattaaactgttgaaggcaactgggatggagtttgtacttttctcagaagattggtagttgcctaatggtttttataaacttctagagtaggggagaagtcaagtggccaactgagctgagaaactctcactcctacttaaatattcatctggctttccctgtaaaggtatgcctatagcataaatataagtatatgggtgggagcagtggctcacacctgtaatcccagcactttggaaggccgaggcaggaggatcgcttgagaccaggagtttgacaccagcccagggtaacataatgagacccccgctctacaaaaaaatttaaaaattagccgggcatggtggcatgcacctgtaaccctacctacttgagaggctgaggtggaaggatcacttgaggctcaggagtttgaggctgcagtgagctatgatggcaccactgcattccagcctgggcaacagagcaagaccctgtctctaaaataaaataaaatgaatcagcatttgaaatttggctaatttgtttttatttgagaaggaaaatggtgtttaccctaagataggggaaataactaaagaagcattggaataatattgaactatttaatatccctttgtattcttaagaatcatttaaagtgttgtataaaagagtagcataggatacttaataatatgctattcactttcaagtctctaattccagttttgaaaacctatgaaataaatactatggtagataaaatggaattgaacagtcagaaacttactacatgaagatgactcatcagttctaattatgtttatttttaactgaaaataaaagtatatgtaataagaattatcgtagtaattgcaatgatgtgatcaaaaaataaataaccaccaggatttttttctttcatttagtaaaattaatgtggcacagaatatcagtcataccattataggtatataagtataattctgtttatttctattaaaactctaataaattagtgaaaagaaactacttattaggcatgtacatgtgttagctctgtactttgcatttcatagttagtaccacagtatctcaagtagtatcaaaacaaccctgtgagatgagaaaattgagacttagagagttaaacaagtcacccagctagtaagcatttcagcagggatttaaacccaggaacgtctgccctcaaaacctgtgtttttctcacttcaccacagtcattcctgggacgtgctaaaatgtaaacaatagaatttagacaagttttgagtttccatagtgttcagtgttctttaggtattgcatttatatccagtccctttcccccattctctttctataccgcaaactttgaatagctaagtagcatattgagatttcatctttaactgtatttgaactgcttcctggtcttgctgtgtaatgctcctttaatacagggctattctaagaataaaacccagtgtttaaaaaaaaaagatgctgatttatgctgcagaaccctggaaagattcctctgaatttgagatgtgggttgaagctcagggcaggattagaagaaagactagtaaggcctctagctcccctctgcacactgtgtcccccttggacaggaaatatttgaccattcttaaagtcaaatcttctctattgcagatgctgatttctgcgtaacagttttaaaagaatttctgcctgggcgcgatggctcatgcctgtaatcccaacacttttggggggccaaggcaggtggatcacctgaggtcaggagttcaagaacagcctggccaacatggtgaaaccctgtatctactaaaaatacaaaaattagctaggcgtgttatgctcctgtagtcttagctactctggaggctgagacaggagaagtgcttgaacctgggaggcagaggttgcagtgagccaagatctcaccactgcactccagcctgggtgacagagcgagactccatctcaaaaaaaaaaaaaaaaaaaacagtcgggcgcggtggctcatgcctgtaatcccagcgctttgagaggcccaggcgggtggatcacgaggtcaggagttcaagaccagcctgaccaagatggtgaaaccctgtctctactaaaaatacagaaattagccaggcgtggtggcaggtgcctgtaatcccagctactcggaaggctgaggcaggagaattgcttgaacctgggtggcagaggttgcagagagccgagatggagccactgccctccagcctaggccacagagtgagactccgtctaaaaaaagaaaacagaaaaagaatttctggcagtctccccttttctacttctttctagccattgtatcttagaaaaactttgaagtcctgtcatccaacacctcgtcccatgtagagtccgtttatgagcagtcctgaaggtgtttacgtggtgtgttgacagttcacactctctaccaaccttctaaggcttcagagttgtagttccttgaccttttcttttcgtggtagctgattgtagatgctttattctcctggtcattcttgtctagacccatgctagttttccaataccccatataaaaatggtgtttgtacctgcacagtcttctagaaacggtgactgtgactatagctttttagtcaccttttctgccagtcagctcatgtttaactacaatgcccagatctttttaacatgaaagtgcccctagtctttatttttaaaataactgtaaaagcaatgcatccccattgaagacaggaaaatttaaaaagcttctgggaaaaaaattgaatcactagtctgcaatagcctcaaacatttttgaggtttatatacacacacacatatatagacatatcatccaaaattggaatagcatacaaacaattttgtttcctgttttttccccttatgaaatgagcattgcctcatgtcattaacatactgttttcctattgttggaaatttaggtagttgccagttttatgctaagcataacttgtgctgtaataagcatctctatacgtacatagatagggccacaattttttacagcctaagtgtattacattttttaaggctcttggtgtgtattcatcgttagctttttagaagggttgttccagtttatactttcattagcaatgtctgtgactttatctatttcatagaccctcacctgagtatttttttcttgtctttactaatatgaaagcaaaaataaaatttgattattgtttgaggtgtgacgggaggtaaaatgtgatttatcggctttttattgttgttatgaactgtttttgcttctggctgctttcagttgcagttttagtgtacttgtagatttgaatgaaggggttacatattaagggtttcaaattgtcatatttattgcagatatttatcttcaactaattatttgccttttaattttgcgtggttattacacacagaagtgtaatattttttattcaaatgaattgttttgcttttattattttaaatggacacataattgtacatatttgtgtggtacactgtaaagttttgatacatatatgtaatgtgtaatgagtaaatcaggataattagcatatctatcacctcaaacatttctttgcattgagaacattcaaaattcactcttttctttttttctttttttgagagggagtctcactctgtcggccaggctggagtagtgcagtggcacgatctcagctcaccacaacctccgcctcccaggttcaagtgattctcctgccttagcctcccaaatagctgggattacaggcgcctgccaccatgcccagctaatttttgtatttttagtagagacagggtttcaccatgttggccaggctggtctcaaactcctaacctcagatgatctgcccgccttggccttcaaagtgctggaattacaggcgtcagccaccgtacctggccaaaatccacttttatagctatttgaaaatatacaataaattgttatagtcaccctacagtgctatagaacacaggaacttgttcctcctctctgtaattttgtatttgttaaccaacatctggttaactctccgttcccagcctctagtaaccactattctagtctctacttctatgcagtcaagttttttagcttccatatatgagtgagaatatgcaatacttgtctttctatgcctggcttgtttcacttaatgttttacaggctcatccatgttgctgaaaatgataggattttgttcttttttatggctgaataatactccattgtgtatacataccacattttctttatccattcatctgtcgatagacatttagttgattccatatcttggcttttgtaaatagtgctgcaagaaacatgagagtgcagctatctaatcaaaatactgattttcttttctttggtaaatatccagtagtgggattgctgaatcgtggtaattctatttttagttttttgggggcacctccatactgttttccataacaactgagataatttacagtctgaccaacagtgtctaagagtttccctttctccacatcctcaccaacacttaccctttgtctttttgataatggccattctgactgtaggagatgatacctcactgtggttttgatttgcatttccctgatggttagtgatgttgagcatttttttcacataccttttgggcatcaaatgaatatttttaatgataccttccattgcttttctgcatggaagattctctcccaatcctaagaaataaatattagcttgttatttcttccagtttttattatagtttacttattactttaactctacttaatctagaacttattttgatttacagcatgaaatgaccactcaatattttgccatataagtcattaatttttttagtactatgcaataattccttacttttctctccctctgttgctggaaaaaatgtaattggttaaattccatcctgcctgcatggtgtatgcccccgagcagctgaatgtagctagaagaaaacataacatcctttcctgagttctcacttcagatgttgtccacaattcactagaaagccttcatccaggctggcaatcctagtacattcccctctgcgcactaggagaatgctcttttctcaaactgggacatcccctccctgatcccattcctcattgctttcctctgatttcactgaggaactggaagcagtcagaagagaagggctctgtgctccctgcactaacaccccctcctcccagcgtcggcttactctggcttcctcgctggcaccgtggggactgtccctgcttccacagcaagcccctcagtgtaggcgctggactccttccttctctcctgcctaagggctttgctctggcagcgttgtcctctctcttctgcaccatcagtgctcacctctctgcagaatcgtctggcagttgttcgtactgtccacatacttcactattcttttccttaatcccttttgcctgtaaaagtaaacacatgactaataaaactgacattaccacccaaattatgttggctacaatatcttggaaaactacacttggagaactacacttcaggattcagtccaagctctttaccttcccaccggagatgttgaagtgcctctggggttaatccttgggccttttctctcctgcattcttattcagtcccaaggctttaaataccacccaatgctattggctccaatcctggcctcacccctaaattctagactggtttatccagctctccgctcaagagtcctgtgatggtgctcactggcatcttaaactcaacctgtcaaaatctgcagtcttgagtctcatcctgcctgcttcttggctcttctgtcttctccatttcattagatgatagcgctgttcatccccaggcttaggctataagagacatcaacaaaaatgctgcatgagtcctctcttgccttacacatcagttcttcagtaaatccagccagtgctgcccacaaactgcctctcaccgtttcttcctgcctcccctactactgcctacactcggcactgttgtctctcctctgggctgccgtgcgggcatcctccctgggcttcctgcctctgcacttaccctccagagagagcatcacctcctcgtgccaaactctctgtggcctcccatcacatgtggaatacctcccgagtcctggcttgcgaggccctgcagggcccagccctttgctccctctctggccttggctcctctgctgcagctctcagccattttgctccctccagcaggcccataggcccaaccaggcctccagcttttcccaccgcctgtcctgctcttcctgtaggtggtggcctggctcgttcccttctgctgctttctcaaggctctccacattttactttgtatatcattctctctctctctttacctgggtttattttatttgtgacctggatcctcttttttgtctaaaatgtaaacctaacatacatttatctggcttttctctgctctatctgttgggcctagaatagtgattggcatagcacccaatacatgtcgtctgtgtggatggagttctgtaacagagttgtatctctttgctttcttccagtggctctccagttcttacagcgatgtctcagtcatttgagcctcactttcacaactttttttttttttttttttttagagacagagttgtgctctgtcatttaggctggagtgcagtggtgtgatctcggctcactgcaacctccatctcctgggttcaggctattctcgtgcctcagcctcctgagtagctagaattacaggcacacacctccatgcctacctaatttttagtacagatggagtttttgccactttggccaggctaatctcgaacttctggccttaagggatctccccactttggcctcccaaagtgctgggattataggcatgagccactgctaccagcctaaaatacatttattattataaatggaaaaccaatatcacttgacatgaatagaagttaattgcaaccataggccgggcacggtggctcatgcctgtaatcccagcactttgggaggccacagcgggcggatcacctgagctcaggagtttgagaccagcctggccaacatggtgaaaccctgtctctactaataaaaaatacaaaaattagccgggcgtggtggtacgtgcctgtaatcccggctactcgggagtctgaggcaggagaatcgctttaactcgggaggtggaggttgcagtgagccgagatagtgccactgcactccagcctgggcaacagagcaagactctgtctcaaaaaaaaaaggaaaaagaagttaatagcaaccataaacacataaaactgtccttgcccacctaaatggtctcgcctataatatcttagaaaactgtggtctaggattaagtctaggctctttaccatagtagacaaaagtcatcccgagggccatacttgtgtctcctcctcctctgtgtctcacagctcatgggccagcagcacgtagcgcaacatcttgcatcagcttttgtgcacactgacccttcttcatggagtccatttctttatgctcttcacctcacagggctatttcctgtttccctctgaaactgccccatctctccctcttctgggaggtccccctcaaaagctcatgaggtgcacctcccacatctattcatcctattaagttgtggttatctgcacagtgttttttcccctccatgagtataatttgctgagtgtatcttggaccagacagtattttgaaaagtgtttttctcataaaactcaaagagaaaacatatgtcacactgaaagctgttttggcctccaggtcccacagctctggtagctacttcttcttttccaggggtcacttttcagcagcgacattttccctgcaacttttgctgattccattaatttgttcctttgtgagacaaaatgtcagttacaactggaaatgttaccataaaattaaagagaagttgttctgtggtctcttgcccataacaagtgattttggagaatggtggcaacgtggtagggaagagtgggttatttggttttcttttttacttgttagtttctctcatattcagtctgttctcagattgtcttgtttcagcattaataattaccttcagaggattttgtcttgtattacaccctaaataacaaatttgttttgtttattcagacttgtggtaagtaggtttatattatattactgtatacctttttttccttcaaatttaacactggaatagcccaaataagttttttaaaaaaggttttcatgaaagtcacacgcagcttggctttcctgtagtggattcggtttgtgtagaaggaacagagtgaaaacatcactggtttctggaataggacagtttgggctagtatggcagtatcaagtgctctgtattcagagaacatatagcaggaaattatgtttatgtttgtgaaataaatctgttttcaactgtctgttcagaaaaaattagtactaataactggtggaaaacattcgaccatactcagaaacctgtcactcttgttttagggttggattgaagaatattgggaaagctgggacactttgttttaattgagagaaatattagagggtcctaccaccagctaataagtaggtttgcgtttttttcatgaccaagtaattccagagaaactcttcctttgaatgattagacacttcactgtcctcctcctcctcccccacaaaagttttttgagcatttgagcggaacagcttgctgagggcagtgctctgtgtgctgaggaatgtttatttctgtgcacactggagagtgtgacaatagattcacttcgaataatttttggtgaaaacaatatgctcagagcaaactgaaataagtgaataacaaggcatctaaaattatatggatggtactgtgtttacctttagatgtcagaaccttgacagctccctcgtgtgatagtgcgtccttccctgctcagcctcacttattcttctgtctaggagagtcttctttcccccaggcaactcctgcatatactgaaatccggtgatccatctaggaaagacttgtgtttactgttcttgctgtctactctgccccatgctaaggatgtgagatgaataaggatgcctccaccagtgtttgtgtctttagcagctgttgtaccactttgcacacagtaggccctcagccagtgcttgtggaaaccatccatttatggagcctctgcattttctccttgtaactctttgtgtttttgtggtgatgcagagaatccacatggggttctggtgtgtgtatctgttccgattttgaagatgtgagcatctcccgagacatgatctgtttgtacctgtgaaatacttaaccgtctgtatttattttcttttaacaaaggagagtctgggcgcggtggctcacacctgtaatcccgacactttgggaggccgaggtgggtggatcacgaggtcaggagttgaagaccagcgtggccaagatggtgaaaccccatctctactaaaaatacaacaattagccaggcatggtggtgggcacctgtaatcccagctgctcgggaggctgaggcagagaattgcttgaacccaggaggcagaggttgcagtcagccgagatcgcaccactgctctccagtctgggtgacagaacaagactccttgtctcaaaaaacaaacaaacgaaaacaaaacaaaacagaaaacaaaggagcagagcttctccttttgtttgttttttttttcttctgagacagactttgctcttgttgcccaggctgagctcctgacctcaggtgatccacttgcttcagcctcccagagtgctgggattatagatgtgagccactgcgcccttgtcttttaaacaaaggctgcttctttgtcttttaaaatagtgctgggagcctctgttcctgttgttaaagttagtattgtttatagactgaccatactctgtttttcatttttaaggattttccaatggactctttactgtaatttatataatctcttattagagttaattagccccagaaatgttattgatttgataaatctaattattgagtttaaaatggtctttgagtttttttcagtatatatcatgtatcaaaaattttctatatggtgataaagatgtaaaagaacaatgtctacttcagtaaactaatgttgatcattgtaattttcttgattttgatattgactataaaacatacctaaaaaaaagtaagtggacaatagccttgctactatttaggggataaacatggtttaatctttaaaccatgtattttagattaacccaaatatatgtgtacatattaggcagtgtagcagatgattaagaacatggaattctaggtgtggtggctcacacctgtaatccccatatgtttggaggccaaggctggaggatcgcctgagcctaggagttagagaccagcctgggcaacagagtgagacctcgtctctacaaataattaaaaaattagctggttgtggtggtgcatacctgtagtccaagctcctccagaggctgaggtgggaggatcacttacgtcagggaggttgaaggtgcagtgagccacgatcacatcactgccctccagcctgggcaacagagcaagactctgtctctagaaagagaaaaagaagaacatggaatctagagccagactgggagtgctgaaatgctagcttggatgttatctcacctctctgagcctcagttccctctctgaaaaatgaaaatgattaataggacctacatctttgaattgctttaaagactgcattgatacacataaagggtttacagctgtgcctggtatttacgtagaagtgctgtatataagagtaagctattattactacagagacaaggcaaacaggttaagtgacttgttttccattgtttggtttcttgtcttgtaatatataaagatataggaacaacagaaaaatcaagttgaaacctctccatgttacagaactgagttttctgtgcaaaatacatatggtggggagaagtctgctacaaccatgaaaggaagaccatcactcaggctgctgaaaagctgttagacacactgggtgggtttgactcacctttatcacttatagctgcatgtccttgggcaagtaacctaacctctgaagtctacttgctcagctataaaatgggaacaatatgttttttttctcatttgtatgagaaaaaaatgaaataacagtgctagccatacaataaatatggaataaatgttaaggtctttgtaattatgaattcatgctaattataattcctgtttatgtgactcctaaatctttgattagccacagggtgtcactttctttaatgaaaacaataaattaagataatttattagcttataaattaaggtagttattcacatggaaattggcttcagaactcaaactgtggtttcagaaacagtttattaacaaatgtgcaatagtagaattaaagtaattttgggaaaaatttgaagatatttagtgttaggatgagcactaactttgagatttacagatttgttccctcattcctcaaagtttattctgtacctgctaagtctaagtgcaggatgtaaagattaagaccaagtgtctagcccccaggaagttcacagtgcagctggaagacagtcaatagtgacaatactatgaattgacccctggggtttgcttgggctgatactgggttccagtggaggcctgccagaagtgaacagtgcctagaggtaatgcattggacatccttcagtcacttgtcagtaaacctgtggaattctgtgcatctgtcttgtgaatatacaagtatcttgcaaaagatctcacttggctactgaaaccccagagcagtggttattatagtaaaactaaaagagggcgggagagaggaacagaaggagggaaaattcttcatggatctgtgatttacaatctttaaagagattaatgtgaggtttaatgtgacaggtgatatacttgttcagtcttttaattgagattgacagttctttgaatgaacttgaactgtgacagccaaaatcttttcttttatgtataggcagttaaaagctttattttccctttttgttatgagagtttctaaatatgtacaatagagagaataagtagtacgatgaacctccatgtccccatcacccagattcagcaatcaacaaatggccagtggaaggtcttctggacctctgcctgtgccctttccacctcgatattttaaagctgattccatatgccatgtcatttcctctgtaagtatctcatgtatacctctaacaaaataagactgttttaaacatagccagaataccattattattcttaaaaataacataatttcttaatgccattaagatagatattttaatgtcaggtttgttagattaatgagtgaaatagatgttaaaccatatgttatatttctgtaatacctagtttactaattttttattttctaagtatgtggttttgaattggtctttattttcctgttgtctagttagcataccaccttagtttacattcaaatattattcaaatattattttttatcaaaaacttttaccccctttaagtgaaaatttacaaaaagctgtgagtataattagcttatttttaagcactcccaggaagaacagagtactgtaaacaaaaattatcggaaaagaaatttgaaggaaagtgactttattgcagtgaacagtttgcagtacagggagacacagcctttggtgtaaaacgaaggtggggtttgggttttataacaaaagtttcaccctggttcccagccaggtttatttatgcaaatgcaggattcaaacttgcttagttccagctggttgatatagctgagttctgatgggttcgttcaggtgacctctgaaagtttcaaagttgaacagaggtgtgggcttttggagaactcagagtacatgtgtgactgctagtcaggaaacggccacttggctgtgtattaaattgaaaagattcttgccctcaagaagctggcagtctacaaggaagaaacagaaaaacagtaagatagttgctttaatgagaatatatacctatgcattttggaacagaaatgagtctctcagtcctcttgggagtgttgggaaaggtgctttgatgagtgtgggtaaatggtcttttttttttttctgtaaaccttaacaaaaagtaaatcatagaatttggtgttgattgtccactgtatgccaggcactctgctggttagcaggtctacccctgtatagtaggcatacattttaacatgtgtacagacacacatagatgtatgtacacacaggtatacatacgcatgcacatatacagagaaggggtgagagggagggagaagggaagagtgaggtgggcggacaccttcatggagttttgtctagtgagaagagggagtttacaagcaataatcagcattattacagggacataatttaccaaggagtatagaaagggcagggactacctgacgtggtgactattaagtctgagactaaaggacaaaaaggagagaaccaatatgagtaacgagtgggcacgaaatttctatgcagaagaaactatgtgttcagaggttctcaggaagtacagagcttggcaggtgtgagaaaactgaaagaaggcctctgtggctggaatgtggcgagactggagaagttagcagaagccggtgtgaccctaacaggtctgttgcttaaggcctggcatgtcactacactgacaccaaggctttccgtggagaaggagtttagtaattatagagcagctgaaagaggagatgggaggaaaccgcacatcgcctccctgaggagtttgggtctagagattttaaggggtttggagtgggctgatgtctggggatcattgattggttgaagagtgcagggtgaggtcataggacgggagatagaactgcattctcacgctgatttcgttcctgtcggggcgggcgggggggggtcttaactggctgacttcagctgtaccactgtaattcagggtctgaagcacatcttaagcaattctttaaaaagtttatgattctaatgtcagcgatcctgtctataggaacagtggggatgcaaatgattcttaaacaaaaacgttatgattctaaggtcagatatcctatctagaggaacagtggggaggcagatggtcagtgtctagtgctatatgacttttggttacaaggaagtgggtcaaagtgcagcctgattacagtttaattataactatatttctgcccagaacttggcatgtaattcttgttagcctgtgaggatggtttcaccagatctcaaagggctttgtaaggggaaaaaagtacagttgactcttgaacaacacaggggttgaggggactgaccccattcccaaaggcaaatggaaatccttgtataacttttgactccccaaaaacttaactactaatagcctactattgagcggaagcctgaccaataacataaacagttgattaacatgtatttggtatgtcataagtataatatgctatattctcacaataaagcaagctagagaaaataaaatgtaactaagaaaattataaggacaaaaaaatattatttactattcattaagtggaagtggaccattatgaagatcttcgtcctcattgttttcacatagagtaagaggaggaggagttggtcttgctgactcaggggtggcaaaggtagaggaggtggaaggagaggcaggcacacttggtataacttttattgaaaaaaaaaattcgtgtataaatggacctgtccagttcaaatccatgttgttcaagggtcaatggtagtatctttttgttttccatgacaaagtttgtgtccgagacttctaaaacaaaagcagattaacaaaagaaaagcacacacatttatttaatataagttttacatgacatgggagccttcagaaatgaagatacaaagaaacagggacacctatgtatttttatgttaactttgatgaatagtggagatgcatggagaaatatgattggaggacgaaaggatatctctaaaattctctcagtaataaatgggagttgggggaacttaggaagacctgtttgttcagattcttttcttcagggataggaacattcctttattccaggtatacagaagatacctctctgaagaggatcttggacctactttaggggaaagttagagaattattttatggactatttcagagggaaagggcagagaaggtgagagtggccttcctgattctgctgttttctcaaatgccaaggtgtaccatattttggggcagcatgtcctgaaccccatcaagggcttaatgataatattatacatatattatcattaatccgcatagcaactcgtaatgttcttgttcctattttactgaattggagagattttaagtaactttccaaaattacccagctagtaagtggtgaagcaggagttttaacattattgttttgtcggtgaaataatccaactccataaaatattttaagaggtttattctgagccaaatatgagtgaccgtggcctgaaacatagtctcaaaaggtcctgaggacatgtgcccaaagtggttggcttacagcttgattttatacattttagggaaatataagcatcaatcaatacatgtgaggtgtacattggtttgatccagaaagatgggacaatgtgaagcgagggggcttacaggtcatacgtgaattgtacgattttctggttggcaattggttgaaggagttatcatctaaaggagtatctgggttaagataaagggttgtggagaccaaggtttgtttgtttgtttgtttgtttgtttgtttgtttgtttcccgagagacagaatctggctgtgtcacccaggctaaagtgcagtggtgcaatcatagctcactgtagcctcaaactcctaggcttaagcaatcctcccacctcagcctcctgagtagctggggctataggtatttgccaccatgcccatctaatttttttttttttaagagacaggatctcactgtgttgcccaggcttgttttgaactcctggcctcaagcaatcctctggcctaagcctcccaaagtgttgagattacaggcatgagcccctgcactcagcccactcagcctaagattcttagtgtttagatgaagactcataggtggctacgctaaagatgacaatagatggcaaatgtttccatttagacctttaaaaggtgctatactctcagttaaactcttcaggattgggagggtctggaaggggaaagacctagttatgttaatagggattcattcaggctgggcataatggctcacgcctgtaaactcagcactttgggaggctgaggccggcgaatcacctgaggtcaggagttcaacaccagcctggccaactggcgaaaccccgtctgtacaaaagttagccaggcaggatggtgggtgcctataatcccagctactcaggaggctgaggcaggggaattgcttgaatccaggaggcataggttgcagtgagtcaagatcatgccactgcactcaatcctgaacgatagagagagacggtctcaaaaaaaaaaaaaaaaaaaggagattcattccagatgcagattttcccccacaaaaggtagctttgcagggtcatttcaaaatatgccaaagaaacatattttgggataaaatattttatttccttctttatctgtcatgtgaggttatgctagagtcaggttggagtggtatcttattgctgcaaagagtttgttctgtctgtcttaggatctgtgttttaaagttagtgctggtcagcctgtctaaactccagaatgaagaaggtatgatgaggcatgcctgaccccctcttcccatggtggcctaaactggcctttcaggtttctttggaatccccttggttgagaaggtggatccattcaatcatttggggggcttagaattttttttttttttttttttttgagacggagtctcgctctgtcgcccaggctggagtgcagtggcgggatctcggctcactgcaagctccgcctcccgggttcacgccattctcctgcctcagcctcccaagtagctgggactacaggcgcccgccactacgcccggctaatttttttgtatttttagtagagacggggtttcaccgttttagccgggatggtctcgatctcttgacctcgtgatccgcccgcctcggcctcccaaagtgctgggattacaggcgtgaagaattttatgtttgtttttcagtcttggctttagagcctgtgatctttctactgcatgaggctgcctcttagtaaagaagcaaaatgcttgcagagtactctgtatttctcctctgaatgtttaatatgctgaacacttcacaataagtgctaacacgaactacatggtcacatgagatttttgttttcaaacagttttattgaggtataatctacaagccataaattttcccattctaagtgtaccattcagtgatttttaggaaatttaaggagttgtgctctcatcaccataatccagttttagaatatttcatcaccccaaaaagattcctttctgcctagtttcagtcaatcccagctcccaaccccagccccagataagcataaccagctttgtctctatagatttgccttttctagacatttcatataaatgtccagaatcctatgttacgtatagtcttttgtatttggcttctttcacttagcataatattttctaggttcatccatattatagactatatcagtacttcattgttttttatttctggtggtacccatcgtatggatatattacattttatttatccattccccagttaatggacatttggattgttttcagtttggggctatttaaaaaagtactactgtaaacattcctgtgcaagcctttgtgtgcacatgttttcatcctcttgcgtagattcctaggagaggaattgctggattctatgataagtttatgtttaacttttcaaagaaattgacaaaccattttccagagtgactttttacaattttacattccctccagcaatgtattagggtttcagtttctcctcatccttgcctacacttattgtttgtctattttaatacagccattgtagtagatgtgatgtggtatcccatgtaattttgtctttttattttcctgagacagggtcttgctctgtcacggctacagtgcagtggtgccatctctgctcactgaagccttaagctcctgagctcaagtgatcccccgacctcagcctcctgagtagctaggactacaggaacacacaaccatgcccagctaattttgtttacttgggtgtctcactatattgcctaggctggtctcaaactcttggggtcaagagagccgcccatcatggcctaccaaagtgctgggattacaggcatgagccactttgcccagccatgtgattttgatttgtacttctgtgataactaatgatgttgagcatctgttttaatgtgtttattagccatttgtgtatcttctttggtaaaatgactattaaaatattttgcctatttcttaggctgggcacggtgggcttatgcctgtaatcccagcactttgggagtctgaggcggaaagatcacctgaggtcaggagttcgataccagcctggccaacatggtaaaaccctgtctctactaaaaatacaaaaattagccaggagaggtagtacacgcctgtaaacccagctacttgggaggctgaggcatgagaatcgcttggacccaggaggcagaggctgcagtgagtagagattgtgccactgtactttagcctgggcaatagagtgagaccttgtctcaaaaaaatcaaaaaaaaagaaaggaaaaattttttttgtctgcttcttaattggtttgtcttattattgagttgagttttttaaaatttattttgtgtaagttctttatcagatatacgatttacagtattttctcccaacttgtgcattttcattttctcagtaatatattttgaagggcaaaagtgtaacagtagtaggttccttgcccgatgcacatggcaagtcaatataccgagccaccgagttacagcagaaaaaggtttacttgtggagccgctaaatgaggagatgggaggaaacctcaaaggggtctccctgaggagtttggggctagagttcttttttttttttttttttccgagaccaagttgcccaggctggagtacggtggcatgacctcagcttactgcaacctccacctcccaagttcaagtgattctcctgccccagcctcccgagtagctgggattacaggcatgtgccaccacacctggctaatttttgtatttttagtagagacagggtttcaccatgttggtcaggctggtctcgaactcctgacttcaggtgttccaccgcgggaacctcggcccagcctcagcctctcaaagtgctgggattgtaggtgtgagccactgcgcccagctggggctaggattcttaaaggttttggagtggaccgagtgtagggatcattgattagtcaaagagtgcagagtgaagtcatgggacagagagatgaagaaactgtattttcatgctgatttggctcttctgtggggatcttcaagctggttggcttcagcttttccactgtaattcaggatttgcttaaggaattcttaaacaaaagccttatgattctaacatcagagatcctgtctataggaacaatgggtatacagatggtcagtatctaacgttatgtggcattaggttataaggaagtggcttaagatgcagcctaattaatgtttaattataactatgtttatgtccagaattcttgttaaccctgtgaagatggctttaaaagtttttaattttgatgaagtccattttattattttctttttttatgagttatgcttttgctgtcatattcaggaaccctttgcctaacctgaggccatgaagattttctcctgttttcttcaggagtttcaaatgaggtattgtgataggttgggtttcactttattaggaaggtcataaaattcttctgtgaggaagtggtactttagctgagatctgaaagctgagtaggaggtaagatgggagggaagagattccagctagagggaagagcatgtgtaggtgggatatggccagtctgaagagctagaagcaggtcgtgaaggctgcagtgcagtgcatcttctggttctcagtgaaactcatttatgccatgtgaagcaatcttgctacagcagtagtctcagggaaggcttttaatgagcaatggaaacatgatcagatttgctttctagaaaaattactctggctgctgtgtggaagaggcttggaaggtggccagtatggatttggagtgaccaggtaggaggctgttggccagttagtgagaaacgatggcagcttggacccaggagaattacgcagattaagagtattagggacatatgagagtctgcctgcctttaatactgcatggtcagagattatggcctgcataatttaggagattgtaataagggtgattatgctagtttctatggcttctactccattccccggcacacttctcttttttgttctgctcattgagttttccttaccagaaaaagatagtcttaatagcctagacacagcaatttaaatattttcattgctttcctcctcttccataagactttgggaaaaaatggaaagcaacttatccatacatccatttgggatttctaagctaatggtgagaagtgtcttgctcagaaaactaaaacatttattatgtttactaagtgtttccattctgtgcatgtgatacctatgaacatattttctttttataaattttctgaagtatacagaaagtcaaaggtttctcaatttagattatagagaaacagataagtaaatgctgctataaattatgaaaaaaacacaacatgatattgttaccagaaaggggtcctgatccagaccccaagagagggtacttggatcttgtgcaagaaagaattcaaggcaagttcacagagtaaagtgaacccaagtttattagagaagtaaataaacaaagaatggctacaccatagacatagcagccccgaggactgctggttggctgtttttatggtcatttcttgatcatatgctaaacaaggggtggattattcatgagttttccaggaaaggggttgggatttcctggaactgatgcatcctcccttttccagaccatacagagtaacttctgaacatagtcctggcatttgtaaactgtcatgggactgctgggagtgtcttttagcatgctaatgctttacaataaatgtataataagcagtgaggatgaccagaggtcccttccatcaccattctggttttgatgggttttgactggcttctttactgcatcctattttatcaacagggtcttcatgacctgtatcttctgataccagttctgctaacctcctatctcatcctatgactaagaatgcctaacctcctgagaattcagcccagcaggtcattttacccagcccctattcaagatggagttgctgtggttcaaatacctctgacttattttctccttcccttttacaaggaaattttaattctaagggttgtagagggaggaagatccatcttctcttccttaggctgaatggggtgatgatattcccgcccaactattagcatctcttgtattcacggtagagagatgcttggtcagaaagcatccatatggtgagggccattcataactcttgagttctgaccaaaggtgatatttggaagactaataagtgttcaatttaataaaatattgagttaacttattctgcattcttacacaaagagcacaatgacagtatattccacaagagtaaagcaaaataagtaaaattatctcaagtaaactaaataagaaggctttccatgaactgggcaattgttggaactaagcagacttggagtggctgattctaatatgtgcctagaattacaatattgatccagatttttacattacctatccctcttgtttcttctgagcttgcatccagaggtcactggttggttcacaggaataagctgggtcagtctaaattgcagggaaaaactcaaaaacaacagacaaggctaggttctagtaacaggtgtactatagttattgaaacatagtttttctctctccagtctcccatttttactaaagacaaagcatgataggcttgatttgtttgcaaaataaactttagtcttattatacctggcctgattatttgtataaagtgcagcaagaataatttttgctgtataggctctttttaagttggctttgatggaactttcttccgtaaggaatcttagagtagacttcttattaaaggtttgagcccagccaggggtttgtgcttgcaaatacctgtgtgagttggataaattgtttccttctttcagggtcccaagataacctgggcctcctgagcctgtcagaaagtgacattctttacttaccacaggtcaagaaccctatgcagggactgtgtagacaaggcatgaggccagttttcccaaggagcttttattggctctgtaagtcaactttgattccttaaagaagcctgtttatatttgaaagcatgccatttcagtcaaagccttggtaaaataaccagtttctccaactgggccctgttacaaaagaaaacagattcttactgtacttatgcaaataattatattgccataaattacaaatacaaataatttccaaattctggagaaatcagatagagagaaagaaatatgcttcaaattttgtttacaggagtacactttacccaattggtgcaaaagtagttgcaatttcagaccatgaattttaaatcgttataactaggctcaaacactttttttttttttgagacagtctcgctccgttgcccaggctggagtgcagtgacatgatctcggctcactgcaagctccacttcctgggttcacgccattctcctgccttagcctcccgagtagctgggactacaggtgcctgctaccatgcccagctaattttttgtatttttagtagagatggggttccccctgttagccaggatggtcttgatatcctgaccatgtgatccgcctgcctcagcctcccaaagtgctgggattacaggtgtgagccactgcgcctggccccacatttttattaatcaaaatagtaaccgttacaatcaacacagtttggacaatgagaaataagtttattcctgtagcataaaaatccatgctttgggatttgacaaacttttgggaaacattttctgcatcctcctggttgtgggagtgttttccctgcaaaaaagttgtcaagatgcttgaagaagtagtagtcagttggcgagaggtcaagtgaatatggcagatgaggcaaaactctgtagcccaattcattcaacttttgaggcattgtgtgatgtgtagttgggcgttgtcatggagaagaattgggccgtttctactgaccaatgccagctgctggtgttgcagttttctgggcatctcattgatttgctgagtatacttctcatatataatggttatgctgggattcagaaacctatagtgcatcacaccagcagcagaccaccaaacagtgaccgtgagctcttttttggtgcacatttggctttgggaagtgctttgaagcttcttctcagtctagccaatgaactggttgtcaccggttgttgcataaaatctacttttcatcacacatcacagtctgattgagaaatggtttgttgttgttgtgtaggataaaacaagatgacacttcaaaatgacaatttttttgattttcactcagctcataaggcacccacttaccatgcttttttacccttccaatttgcttcaaatgctgaatgaccacagaatggttgatgttgagctctttggcaacttctcgtgtagttgtaagaggatcagccttgacgatcgctttcaactggtcgttgtcaacttctgatggctggccaccgtgctcctcatcttcaaggctcttgtctcctttgcaaaacttcttgaaccaccattgcactgtcagttcattagcagttcctgcgccaaatgcattgtggatgttgcgagttgtctccactgctttatgacccatttcgaactttgatacgaaaatcgctcaaatttgctttttgtctaatgtcatttccgtagtctaaaataaagataaacagcaagtagtaagtcattagcaaaaacacataaagtgagaaatgcccattaaaatgacctataacataacgacatttatttaagaatgtactgcaatatcaaacagcaaattccagcagtgcaaaacagaaattacttttgcatcaacctaataaaaactgtaaatagctcaaaagaaaagttttcttgactctgaaaaacaaaacagaaaggatgggcaacattttaagtagaaagtcataaacagattatttcagtgttttattcagtttatgcaattcccattttgctcaatatttatgaatacattagtttttcaagagagtgttggaagttctttcctattttattggcatacttttcaaagttatcagagacctgcatttaagagtactcatcagaggccgggcatgttggctcatacctgtaatcccagcactttgggaggcttaggcgggtggatcacctgaggtcaggagttcaagaccagtctggccaacatgctgaaaccccatctctactaaaaatacaaaaattagctgagtgtggtggcacgtgcctatagtcccagatacttgggaggctgaggcaggagaatcacttgaacctgggaggcagaggttgcagtgagctgagattgtgccactgcactccagcctggcgacagagactccgtctcaaaaaaaaaaaaaaaagagtactcatcagaatcttatagttgattataaaccatcctttgaagaggatcaaaacaagacaattgtggatgacaaaatgtctttgggcagccataatcaaagatgcaattgacaaggaaatttggttgcttctgtggtatacaataatttaacataatataattactgataacgtacactaagtcatatcaaaattataggtgtttccagtatttttggaacacataccaataatatatttatatagatacaacccaaagaaagccaaacacaacttcatatttaacaatgcttcctgtatgattttaatataccaaataagccaaatatatcattttttactttaggggactgatatctaaaagattaattaagaaaaagacatgatttataattttactttggaaagtttgtcaaatatcaaaggtttaaaacatttgatattataaaatagaatcctaggtcacaataagtcatttagccaaaatgataaagattttaaaaagacaaaaacctttacctgttaatacaggagaacttagctttccaaacaatctcttttttcctgcctcttttttgtagcttaggcaaacaaaaatctttcattgtcttttaatattacatgaaattcttcttcatgggccagatttcacctttgtatttgtgtactatgaatgttaaacccaattcttagtaaaacccttagataaatttgtccagtcttaatcagtttgaccataaggtaggattcctgtaaaccttttataaactgttaaaattttctgttaaataaaagattaatattctaagaaaaccctgcagtgcttttatttcaatattcaatttatgtaaaaactgaatattacccctttaactttagccaatgtgtttacacacagaatttcttttacaagattagtctttcacaaacctttcacaatttgctcaaaccttcagctttatcatatctaacttaaaacaatcctttaaccttttaaaccaggcaaaaaaaaaaaaaaaaaaattcccacccccatgccttcttatagtattttaccaaaaacacattctacttttaacacaccttacatgtaaaactgtttagccagtagtctcagttacgtatgttatggtattaactcttagcaacttttatttttggtaaaaatcctggtaggtaccaggtgtgaagcctaggacaccagacagaagtgcagacaaggtatgatgctttccagcatacccaaggggcatggccaactccacaggtccccaggccttatctagaatctaatggctccaaagcagtcaagctgaacaattttcaagtcaaagaagcagtttatgaccttaaagcatttaatccattcaaagtgggatggaatgacctctgaccaggagtttcaacatgtggtccctgggcaggatggaagagaggacagttgccctgagtgacagaaaagataggaaaggaaaaagggtgcaagagagagagagaagggaagggaaggagggaagggaaaatagcattgcctgaaatggggctgggcaggcgaggagctcagggaggccagggaaagacccacccagtgcggtgacactgaatcaaaagttcaggtggctgcttgtcagccacaaagggatcttgatctccagcatcttcatgagctcttaagtttctcctttgagaagaaaagtctccccatgtcccatgtgcttctgtacatgcccaattctgtcacccacagccaacagcaaagagcacaaggcaagttaatccaaagacttttaggccaggtgcagtggctcatgcctgtaatcccagcactttgggaggtcgaggcaggcagatcacgaggtcaggagttcaataccagcctggccaacatggtgaaaccccgtctctactaaaaatacaaaaattagctgggcttggtggcgcatggctgtaatcccagctactcaggaggctggggcaggagaatctcttgaacctaggaggtggaggttgcagtgagctgagactgtgccactgcactccagcctgggcaacaagagcaaaactccgtctcaaaaaaaaaaaaaaagattttttaactccctatttcttaggagggactctaaccctgctaaattgggcattttaacccggggattaacccaaagacctttaactgcctgtttcttaggagggattctaaccctgctaagttgggcctctaacccaattctgttctttaccctggacaaaatactacttacgcaaagttggccaattagtgctgcagtctattcttttgggtcggggtttctccagtgttgtcccttggtggtttgccaggaagatgttactggaaatgggtcccaatccagaccccaagagagggttcttggatcttgttcaagaatgaaggcaaattcagagtaaagtgaatgcaagtttattacaggagaaacaaaagctactccatagagcagccccaagggctactggttggttatttttatggttatttcttggtcatatgctaaacaaggggtagactatttatgagttttttgggaaaggggtggggattcctggaactgagggttcttcccctttttagaccatgtagagtaacttctggacatagccatagcatttgtaaactgtcatagcattggtgggagtatcttttagcatgctaatgcattgtaactagtgtataatgagcagtgaggacaaccagaggtcactttcatccccatcttggatttggtgggttttggcaggcttctttactacatcctgttttatcagcagggtctttattacctgtatcttgtgataacagtcctgctgacttcctatctcatcctgtgactaagaatgcctaaccatccttggaatgcagcccaggaggcctgagcctccttttacccagcctctattcaagacggagttgctctggttctaatgcctttgacaatattgctggatcattttagattcttaacatcctaaatggtaaatataggaccttttgaccatcaacattaagagattccagcaaagaggaaagtgttttatcttgtgtgcgtatttatgtaggggagtgagaaataaaatcctaagccccgtaactgactgaacagatctcctcttagccaaggggacccagagtaaccttgaaaactgagttcacagccatgatgggataggaggtcagacatgcctctcatatgcccccctccctggctaaccatgattaggctttctcacccaagggctaaggagcaaacagccctttcaaaagactccaccgctgatttcaaccaaccaccagacactgcttctcccttttgcggttttcgcataactgaccagcattttttcccataagagaccaccgaccacggaatggttcgggccagtctacagagactgcacagcaagggttttctggtcttcttcaccttttgacatcagagggcagcaatccacccttggatcttgctaatgccaccatttttttgtacatcagtcccatgaaggagcatgaagctccgttgcatgtgtgcacctttctcctttcataaatattcatgactcctcctacagtttattgaatatgtacatgtggccaccctgcttagcatcaatttctgttccctctgcccctccctcaaagtgtttgtgtctggcttctggcctgaggctgtgcttccctgcttgtcaggatggccaccctacaggctgcaacccttcatgagaaataaagctcttctttccagatttatgaacctcattcttcagttgacaggaggaaaaatatctttccctcacccatcctaggttcatggttaagacccctataacaaaagacagattaataagaaaaaagccactgggcatagtggtatgcacctgtaattccagctacttgggaggcaggggctggaggatcacttgagcccaagagttcaagaccaccctaggcaacatagtgagactctatctcaaataataagaagaagaagaaaaagaagaaaaaagcatacaaatttaatataagttttatgtgacatgggagccttcagaaatgaagacccaaagcgacagaaacttgatgtatttgcatgctaggcttgatgaagagtggacagctgtgtagaaatatgactggacaaagagtatgatgtaatagcagtcaactggggggaacttagcaagttctgtttgttcagattcctctctgtgtccctgcatcttcttcttatttgagatagagtcctttctctccatgtgtagggttggcgtctctcacatgaggatcttgtgtcctgcttcaggagaaaatgagaagatccttcctaggttttatgcctgcctcaggggagaagggcaaggggaaggtgagagcgatcctcctgtttctgcagttttctcagattctttcagcttcaaatatctaatacgccacagtgccatattttggggtattgtgtcctgaaccccatcacccaaaatcataaataaaaggaattaggcttaggaaaggaaggaaaaaagaaaaatgaaaacgacttaagaattagctttcaggctctgggtctgcttctaaggaacctacataggcttttataagaaaatttaagaaatggcaaagctgtctgaggccaaaaaaaaaaaagctcacttgtcaagagcattgaactgctttgcacatgaagaatagaatgaagttgttcctctgcatgtgaggaaagatagataaaagactttggaaggcctaaaacagtttatgtcaaaatgctaatcaagtcacttaccacttaccatctctctggaatgctgtgtggttccattttatctgaatttaaaacaatatctatcttgtatggtaccgtctttcataatatgaagcttatgttttcaaatgtctaaaaatcttgtattttcatccaggaccttttttgtatgctatttctgttccctctgcccctccctcaaagtgtttgtgtctggcttctggcctgaggctgtgcttcccagcctgtcagaatggccaccctacaggctgcaacccttcatgagaaacaaaggaaatgcaaatataacagggcagtattcctgactttacaaatcatttcatcaacttgttttacttgattttcaggcaaactgcttttttcataagttggcaagagtttttggatttttctcccctctcctgttgatgatcgtacaccaaaaaactaagcaatgaaataaaatgattgtttgagcttagatgaaactttttccttaagggggtatttcctgaatcttataccctcttactcttatttttttaattaatcgttgttcactcatttcacaatcacttttgagtttctactttgtgcttagaacatagaagacctgaaagtattccatgaaaataatttatttctgtgtattgaattgatgggcaaatcttcatcctaaggaatatcaacatgtgttatcaggagagttcatgaaaaggacattatcacatcacagttttcaaaaccatatgggtcttattttaggaatgttagctcagtttataagttatacttttcttacaaaataataggcttcttgtatatgacttgctgtctttttttcaagaaaatagagaaaggaggtctcactatgttggccaggctggtcttgaacccctggcctcaagcagtcctcctgctttgacctcccaaagtgctgggattacaggaatgaaccactgcacccagctgtgctgtcatactaattgggtacatgtaagggaatcctgtaatatcttggatgtgttaaacctttcattgaataaataatatcagcttataggttgtgtgctattctaaataaaccctcaatattccttcagcttctctgcctactttcaggtgtggtcaaccccaaagaaaggttcatggcatcattttgtgagtatgaatttgggggaggagttcagagggtgtattttattgatcatttggatgtgatttatttttggcatgctatttttaatgcattacagatttcctggccagcttttccatagcccttgggtaacgtcactttttattgaactgaatcttaagtgcaggtgtttttggatacctcctgcactgattccatggaccagtctgatgtcattgtccgttgcctgttcctgagagccccttgtagccacttcctgctcccacttttagccatgaggattgtacttgtttgtttccagcccatagaatggcatgctggtgtttcccgtcagctgtgctgctgtttcctgagctgtgtgctgtttatcttctgcatcactgcacctcaaacgtctggcctgctgtgactgctggctgtggctttgcgatcaagcagccagttgaaggcctactcctgtgtacttgtgaggctgctcctgatatctggcgtttactgtgcagtccccatttagtgattgctaccagtaccttcatcagactgttgccgagcgccaactccatgacaggcactaaagcttccatgttgaaagacacagtgcttgctctcgaggaacgtggcatccagtggaactatagggggcaagtgtgtggtagcaatggagaggtaccagctatgtgggagcgtggaggaaagagagcctgggtctccctggcctgtcagagaagggggcagtcgagctgagatgtggagggtgagtggaagttggctgagtgcaggcgtctgagcaaagggtcaaggcaattacaagtcagggcatggcttctttggagaaccatcaggtgttggctgtgtgtccttcttccgcagctggaaaagcggcttcctagggatacttcctgaatagcagtttcattgcaaagctattcttatacgtctttactgagcgtaaggttgttgtagccagtagaaaacaggaagagtgaggggtaaaatctctgaacactattttgaatcagaagtagcacatcttcagcatctcatacttgtcttttgcacgtccttgtcccaaggcattgataccttcaggtttgccaaaagctcctgctgagggccccaagcaggggtgtcctgtctcccagctgctgcattttttttttcacatcacctctctttctgctcatttaccccttcatctatagagcagttaatcttagagaagcagtaagggagaggtcctgataaactaattcatgttaagctttgaatgttagttttctcagagccccctgaatatagtattcttcatactgaaaaggacatattaaaacatgtaatctctaattggtgaaatctcaagaaaggtgacaaaattcagatgactcagcatgctgcccccacattgacagctcccctgctccgaccttcctcatgcagcatcttcctcagcttgtggactcaggaacttctccaggtccatcttccgtcatccctgtgggctgcaacaccagcctgcctgggaggggcagaatctgcctctcatccccatctcattagctggcagtgaaggactcctggtggaaggagggaggggaccaagacagctattcataatactgatttattcataagtcacttattcataagccttcaacagcttataattgaaagtgatatgtccccatttcaaaaatattttctggaaataatgaggtttccagcagatatgatcagctttcaagcatgctgagatttggctgtcactgaaccttttagaggcaggatatttccaactggtggcatgaggatatttataacaagaggcctttgaactcaaaagcatgttgagctttggataaatattttgtattgcaagtatatgcagtattttatttgaaatatatgtaaatgttgtgggaaacaaaattcaaagctatgtaaagtgctactgaattcataatagatttttgttgtcacatactatctcgtaaattgccaaaaaagtatacccattcttaaacttgaaaaggtttgagactcgttgtcctagattagaatttttggactacttaatttgaaatcaaggcagtatgagtggaaacatctctaaaggtgattgttttgaacatttttaagtgttcttcagtgacattcaaaatccaaggaaatctagcatctgaattctaattaatgttgataatcattacactaatggtaaattttaaacctggttttgatttcctggagctacactgatggacggtggggagctgcaggtatcagtagtcaggttccctcacctttggacaggaagttcttgaagtgaggtgggattggcgtagtcaggatctagctctggtggtggtacggcttgggtcaaggggcaagagccctgcccaaaaagattgaaagtgattccttgctgtagcttttttccttgagcttcaaaggcctttcagattctgtagtgtcctatgaaaatgcaaatgtccctgggaaacactaaacctaaaaatactgaatcttggctctgaagagttgaaaggatcttctcttgttaaaacttttcacaaggcttcggtttggtcgacagctagcttagtataaaatgctagaaaaaaagataatgcaacctagtgaggacaggacaatgagcctcaacaggggaggcccagagttgctgcgggggtgccagaggtggctaggagggctgacggaaagggcagctgccaggacaccacgtccactgcacctgccacccacatccagcctgtttctggattgcgatatttcggttcccttttttttttttttttttttttttttaatccctgagacaaagtcttgctctgttgcccaggctggagtgcaatggcgcggtctcggctcactgcagcctccgcctcctgggttcaagcgactcacctgtctcggcctcccgactagctgggattacaggcacccgccaccacgcctggctaatttttgtatttttagtagagacagggtttcaccatgttggccaggctggtctcgaactgctgaccttgtgatctgcctgcctcggcctcccaaagtgctcggattacaggcatgagccaccatgcccggtctcaggttccctttaaaaagaagaaaatcagctttgtttttctgattgtaatgctcaaattagagaccctcagatctttggagttaaacaaaattgtaggtgatattatttgcaactgcattttatttgcagtctggatcatgagaaaacaactgaagcttgtgtatttctccattcctggtagtgaggggttactgtcaaaattagtccacatttgtcaagtggttgcttgttcttgaatgaataagatagaaaaatatacatttttaataattaatgaaaacttaaattttacatctgaaggatttttctctcatgattaaaacaaataacaaaacccaaaccatagattttaatattatgttcaatcactattcaacaggcttttttctttttgttttttaaattaacattgccttatgtttagatgtgctgacatattaactgccttctttttttcctctatgtcaaaatttctttatatgagtttagtttttagatatttctcaagattcttttgtaacatagcagccaatttaaatcactataaccatagaaatgagaattgtcttactgagaaaattccatcaacatcatttatatactgaaatcaaaatgttggaaacaaggggatgcttttggtttttgtgttcttaagagttttctgttggcaaaaaacgtccttcctgccttccaaatgtgttatacatgggaagaattgtggtgtgtgtgtgtgtgtgtgtgtgtgtgtgtgtgtgtgtgtgtgtctgtgtgtgtttaagcttagagattaagaatagcaaatgctgacctgaatcctgggtctgatctattttaacacatagattgtgttgaacggccatgaatccatagcaggtagaacgcttttaaaactttttaaatgtgtgattatttatgttgaataacaagcataccaggttatcaaggttgggaagtttttgattaattcaaaccttttatctgttgatatttaccagtctgtcaaagatgaccaattttcaaagcagttagaatatactataaaatgttttaataattcagaaatctcttaaatctttgaataccttaggttatcattgtgattagctttgttatactgttggagtctgagagtttcgattaatagaaatttatggttaacattgattttgcatctcttcagcatttgttgccatattcactttctcacatctcactttgcttgtatgtattttttcttctctaaaatttttatttgccagagttttgtctattagctttgaatacaaatataattttatattgtttatgggaaaattaaatgcagatggcttgaaaacttctgtatgttgtctctgaaaatggagaggatgagaacccactctgttatatctggagttcaggacaaagcacagatctggtcacaggggatcttgcctccttctgtgtggaagccaccaagcacagggactggtaatggattccacagaatggcacagagttgctaaggaggaaagcctgccttaaggggcttatccgttattgtcacccataaggttgacaacaggcaattcttgtctgtgattatgcattttggttgctgctggagctcttccgttctggataatttcacagatattttcaagagttaaggagataacatttccgtcatttctatggattgtaccagctgcttcgtctgtttcccattgtataaatatttatacaaggtcaaaatgtaaatgaagtaatgcagtggttgcacagatgtagttcgtctagagcagtggttctcaagcagtgtcagcattacctggggtttggttagaaatgcaaatctttggcccaaatggattactgaatcagattctggatatggggtccaggaatctctgttcactagtcctgtaggtgattttgatgctgccaaatgtggagaaccactggttttctgtctgtacaacccttttgaatggactctttaataaataattttcactcacagacgctggcagttggtttatactactttttctaaagtcttttatgcagcgttttaaaaaaagcctttgattttgaaaagattcctgtagtgatctaaacttcttccattttttcccctcaaactgttaataagtaggccaattccatagttaaaattcaggaacatgtcagatgtggcttaaaaattctagaaattgggcttttgtctaaatatccataacacaaagcttctagactgaagttctttttagtcttaccaaaaaaaaaaaaaaaaagaaagaaagaaagaaaaagctgctatttcatgcggcattttagcatagtgtttctgtaaaaagcatctttgtcaacatatcactgaagagcattttcaaatggcgttgaaccattccttcgaactgtgactcatccatgtaggtatttgtcgatctcctacaggaagcagccttcttggtgctacctgtactcattgcagaagccaccacaccgtacccttaacctcctagtctgagcctgtgaatttgaacaagggtaataatttatgattaagtgcatttcttactgatccatttatcttacactttctggttcttatcattcttcaatcaatcacatggccaggaaaatgaatgtaaaaataccttcaggtttttgttaataattaaatcttattttcttgaaatgtcattgtctaactcaaaaggtcttagattccttaatgctaatctgatattcatataattatactaaaaacaagataggctttgggatcaccctttcctgctccaatcagaagtaaataaaaatagattctcagcatttaagaactggaggtggggccaggcgcggtggctcacacctgtaaacccagcactttgggaggctgaggcaggcggatcacgaggtcagagagttcgagaccagcctgaccaacatgatgaaaccccatctctactaaaaatacaaaaagtagttgggcgtggtggtacgcgcctgtaatcccagctactcaggaggctgaggcaggagaattgcttgaaccctggaggcggaggttgcggtgagccgagatcgcaccattgcactccagcctgggcaacagagcaagactctgtctcaaaaaaaaaaaaaaaaaaaagaactggaggtgaccttccgatccatattcagccagctccaccctcctggcgatgggaaatctgaggcctccagggtgcatggtgggaggtgagtggtgtgctgagacccgcctgcctgagctggccctgcagtcagaccccggtcttctaaactgccttgcccttcccataaaagctaaggtattgttgagcattctgtcttaactatttctaacaagcctcatacacatcttgttcctgcagtgttcattttgttaatactctagatagtggtcatttccttaaggtaattgataggaattcgaaaactgttccagaatactagaatagtgtttcctgcagcatggttttaggaaacagcatttccagtagctgttcctaaggacctaattttgtgaccaactcagtagttgccatgaattctttgttatgtaaaagttatttattctgactatctgcaaaaaaactgccattattcctaactactgtgttttaggtaaggatcatctttttttagttgcatgtaaaagtatagtacttgattaatgtgtgtaaagggtgtgtgtgtgtgtctgtgttggagcaagggttaagaaaagctctgtaaagtcatttaactttctttgaaaacgtgtgttaactttagcatgcacagaattgtttttccaaatgccaattctgaggaataatgttctataatactttagaatactcacagaaataatgtatggtataaaataaatatgtctgttttgaaaactaattattgatgaaggctggatataaaactttttaaaactgtagaaacacaggtcacagaagttgataccttaaaaattcatgtataaggaaaaccaatgccaggaaaatacttttacgggtctttttttttaatccagcctgagaaaatttgtattcatttgtttaagtgggggcaggagattgggagactttaaaaattgttgtgtataccttatttgaaaactgaggtaagaaaaaatgtaactgttaaaaatggtaacagtacaggaaaagtggtttttaaaactgcaaggaaatattgtgtattttgtcattgtctaacaagtcctcagtttctgaacaaaatttttctaaaatatattttactaagctcagggaactaaaagtacctttggaaacagcaattattgaaaatatttaaaaggaagctgaaacttgtttctgacaggcatccacattctggagaaaagagagagaaaaggaaacagtctgtacaattacatatcccttatctgaaatacttgggactagaagtgttgcaggttttggattttttccgattttggaatatttgcagtatgcacttactggttgagcatggctaaaacaaaaaactgaaatcctaaatgctcccatgagcatctcctgttagaatcaggtaggtgctcaaaaagcttcagatttcagcgcagggatactcaacctgtgttacaattagtaagtcccagcaaatgctggcaaagatgcagagaaactagctgactcacacagtgatgatggggatgtaaaatggaatagctactctggaaaagagtttggcagttcctttcaaaaccgaaaaatgaacttaccgtatgacccagcagttgcactcttgggcatttatgcaagagaaagtacttattttcatgtaggaactcatacacaaatgttcatgacagctttattcataatagccaaaagttggaaacagccattcagtgggtgaatggttaaacaaactgtggtacatccataccataaaattctactcaataataaaagggaacagattattatgtgctgtagcttggagaaaccccaaggcaattatgctgagtgaaaaaagcgagtctcagaaggatatatagtacatgattccacttacataacatatgaaataacataattatagatttggagtccagctgagtgtttggggaaggagggcatggctataagaggtgttggaagtaaatgcttggtgtcaccaagtgaaaatgacactcaggcaaaagttttctcagcaaggcaatttacttctatagaagggtgtatcttgtggatggaacaatggcgagagcacaccagacaaggaaggggaaggggtcttattcctaatgccgctagctcctactgctgtgtctttcccctattggctagggttggactgcacagtctaagctaattccaattgtctcttttaaagagagcaagggtatgagccggagtggcagggtgagtagttttggtggaaaggacagttacagaacaggtgactaaggatgcctaaggacagaacaggtgacagaggctaggagggggtcatttactgaaactaggggcaaggagagtaaagaatgaggaagttaaactttaaaatggagaacaaagaacagggaagctgaacatactgacatattggttctttgaagaagaactcagaacttattgtacttaacaatttttctccttcttgaattttaaaggaagttaacaggctaaactttgaagaggaatttactgtatcctgcaaggggaacctgagggagtcttacggtggtactgtattgatgtagtgcttacacaaggctatgcatgtagtaagactgcatggagctgtatgcccatctgcacgcacagcgcatgtgtgactggtgaaatctgaataagctttgtggattgtacccatgttaattgttgggttttgaccttataccagaattatgtaagatgttagcactgagggacattcaggatgtacatttctaggtaacatcctatgaacctataattatttcgaagtaaaaagctttaaaaattgagtattgcaatttcatatagtcatcctaatggggggaaaaatccctgatgggtatacaccaaaatgtgctagttgtagtcatctataataggaaaagtcccctaaaatagggactttcaccctattatttgtggaataaataattttttatggctaaaaattttcctcagtgtacatagttcatgcatcaaaaataccctattaaataaatgcagataggccgggcacggtgtctcatgcctgtaatcccagcactttgggagactcaggtgggcggatcacctgaggtcaggagttcaagaccagcctggccaacatggtgaaaccctgtctccactaaaaatacaaaaatgagccaggtgtggttgtgcacatctgtagtcttagctactcggctactcgggaggctgagacacaagaatcacttaaacccaggaggtggaggttgcagtgagccaagatcgtgccattttactccagcctgggcaatagagtgagactctgtctaaaaagaaaaaaatgcaaataattagaagcataaaaaatttggccaggtgcgatggctcacacctgtaatcctagcactttgggaggccgaggcgggtggatcaaaaggtcaggagatcgagaccatcctgtcaaacaatgtgaaaccctgtctctactaaaaatacgaaaattagctgggtgtggtggcgtgtgcctgtaatcccagctactcaggaggctgaggcaggagaatggcttgaaccagggaggccgagattgcagtgagccaaaatcgtaccactgcactccagcctggtgacagagtgagattccgtctaaaaaaaacaaaaaacaaaaaacaaaacaaatcataggtcccaatttttaaaatctgtcacattgacagaatttaatgtcttctagtggttatgtaatttgacagactgttggcaattgtttttatcaaaaaacagcttgaagagatgtttatttgtattcagaaaattgtttagagacttacagatatttcacagttctctcttgatcatgtcacatgtattttaatatcacaaaactcatatttcctaactcaatataaaaacacctgaattgtaaatattgaagttagtttttaaagtttattcttagtcttatttatctctaatgaacaatgctcttaatctttaatagagagattactagaatttttctcaattcatatgtagtaagtgttactgtttctcttttaacattttgaactcttaagagagaggcttatcctagttttctatacatgactcccagaggtttgggggcctttttcggtcattaacacctcactatatttattacctatctcggttaaaaggcttagttgtagagtatgttgaatatgttcctgaaatgaacttggttttttttaatttcatatatcttgtgccacccttatgccccattaaaacgtataattgagaattgattattccgtcttcactggtaatggaattttttgttgttttgagtaagtaagcatttgaaattgatagtggtaactaaagtggaagttgcagtcagataaaacttgagcaatgatctggagttgaaataaaaagacataggcctgaggtgataatggaattaaatgattactcttgactcgtcgtagaaaaactactgcatcttgttttgattttttttcttttaatctgaagtccatttgttgaagctcttaacatctttgtatttgtctggctttccccagtataataaatggcatcttaatgtgagcaaggggtcatttttccttgtagaaaatgttctgtaatttagatttttcagtcctcattctaaaattcagatgctgttaaacccctagatttgaaatttttccttcaaatatcctcccatcatttcacctctcccatatttggttgttttcttgatgcaggcccaattgatgatttcagtacacacagcacaattagaacatcctcattcagtcacgtcgctgagggcaaatgtctcttagctgttgggcagcaaagttatttttaaatgcccgctttgtgctttttcatagtcatcctgaatagtggctggtgtggtgcaactatactcggtcctcagtgaagctggcttagtgcttagccccgagatacaaaaagggctctgaaatgaagtggggagctggtggggacagctggggatgtttcagatacctagtgaggaacatgttttaaaacttaaaacagtgattgttttctcctattttttataagtcattttaaggccaggcacattggctcacacctgtaatcccagcactttgggaggccaaggcaggcggatcacgaggtcaggagatcgagaccatcttgtctaacatggtgaaaccctgtctctactaaaaatacaaaaaaattagctggcagtggcagcatgcacctgtagtcccagctactcgggaggctgaggcaggagaatggcgtgaacctgggaggcagagcttgcagtgagccgagatcgcgccactgcactccagcctggacgacagagcaagactccatgtcaaaaaagaaaaaagtcattttaagtttcctaatctaacccctcctcccttgtgaaggtcgagacatgattggatttcattctgatgtagaaaaaactgagataaactgaagggccaataattcagcaacacgagagaatcaaacttttaaagcagaagtagtcttgagaaaaatgttttttatgttatatatctacagaaaatcttaattctgttaaaacaagatattctttaattaaaacccctttgatgatttctgcattgatctttggttttgagctgcctattctggaattatttttcaaaagaagattagctgaactttgaagcagttgaagcatacttaatgtattttagggttgacttattctaatgcacttggcagccatgaatcatttgaacagatatgttgacaactgaagtgaaacaaatgaaaagacatcctcttcagttcatttttttttcttacgagtacactctaaattccttgcagatttattaagagtactgaaaggtaactaattcttaagcatctgagtggggcccagagcaggtgattttcagtgcatagtgagtcctggttcttggtaatatttggtgttgctccctcttcaagaggctgttgtttaaataatgctggtattaatattagctgccagctattggccaacattgtatgcttggtgattcgtatttgctacctcatttaatcctgccaacaaccttacgaaataggtgtttttaccgcacttgtatggaggagaagttgcaactctggtgaaatcagttatgtggaaaaagagtctgagactaaatcctgaagaggatttagctgcaggtcctttgggaggcgattccaagaagcaggagcgagggacagggaaagtgagacagcgaggaaaagaagctaaaagcaggaagctgctaaagccagtgaggatgtgccgtcgtaccaggatctctgagaagtgttgagaacgcctcctagaatcgtccacccaaaggatgttagaccagggtcctgagacactgacctctgtcacatgttggttgagaactgccttaattccacaaaactgggctgtgctggctaggttccctgagattcagagaatactctgaccagaaaaacagccacacaggcgtggctgtgaggtgggaccctctgtgcatcccaatgagcgcacacagaactggcttccatagctgcagctgaacgtagaggtagaccagagggctgtgccaagaggcgctaggagtgtaggacctgagttgggcctagcccaaaacctgtgagcacaagaaactcttcccactgtggcagaccgtcttcacgtaaacacatgtgggatgaggtagcaggaaatggagagagggcacccagtactggcaacagtatgagcagaatgcacagaggaaatactatgcatgtgattacatgctaattaggaatatttacttttcctatgttgctttggttagcattagtttgtgtttcttgcatgtatgtagatcagaatataagaagaaagcccatagtattctaagtattagacactgtacctgatttgagatgataaactccatcactgggttttaaggtctgccatgcataccagcttgctggactccggagttgagagtgtggtgctgggaatgtggggatgggcagggactaaggcagataacggacctcattcaccattgtccatggtaagagctgctgcgtttgttttgttaacaatcttgataacacccctaagatgttgatactcccctgagctgaaccagaggaaacaatgccttgggtgaaatggtttgttacagtgtatcccaggacagaaggtagctgaaatggtttctgcagatgactagattttccggagtaatagcacccaaactcagcggagcagggtgtctgccacagacacagggcaggagttaggaaatatttacgtaaggtaaggcactcaggttgtcctttttcatttttacagtcaaccagatttggtcagggacctgaattcatacagcctgtttggaataagcccatattgctgtgtaatagataaccacaaacataacagtttaaaatgaaacaaatttatcagcttccagtttgtagggcagaagtgtaggcaagctgtgactggattctctgcccagtattccatgaggctgagatcaggggtcgcagagctgcgttgttttctggaggcactggagaagaatctgtgtgagggcccttcaggtcattgccagagttcaggcacctagtgattgtgggatggaggccccttttctttcacctgctgtcagcccggggatgctctcagccccaggatgctacccacattcctttccacgtggccccctccatcctccaacccagcaacagataatggccctgtgtcaaatccctgtcacgcttcacatctttctccaagaaggcccagtgcccttcacaagcctagctaggccaggctcacccagatgttccccctttaaggagtcagctgtgccatggacatcacctaggcacagggtaaaatccatcccagccccaggcctagggagtgcagagcaggtacaccagggagcaggtctcagagccacctcaggattctccctgcacccctgtgaagtacaaaggatttaagatctaaaagcaagtttagaagtaatcctttacccatgtaccaggtcaaaaatggtaaatgtctgaccctgatttcattttttgtattctctgtacatgctgtatgagtccattttcacacagctataaagaaatagctgagaggggtaatttataaacaaaggaggtttaattgactcacagttctgcatagctggggaggcctcagcaaagttacaatcatggcagaaggggaagcagtcaccttcttcacaaggcagtaggagagagtgtgagcgtgggaaggaactgtcaaacacaaaaccgtcagatctcgtgaggactagtcactatcacaggaacagcatgggcgaaactgcctccatgatccaattactcccttcctcagcgtagggattacaatttgagatgagatttgggtggggacacagagccaaactatattattctgccccaggcccctcccaaatctcatgtcttttcacattcaaaaccaatcatgccttcccaacagtctcccaaagtcttaactcattccagcattaacccaaaagtcgtattttttttttttttgagatgcagtctcacgctgtcgcccaggctggagtgcagtagcgtgatcttggctcactgcaacctctgcctcctgggtcctggttcgagcagttctcctgcctcagcctcccaagtagctgggattacaggcatgcaccaccatgcccagctaatttttttttgtatttttacaaaaaatacatgaccaccatgttagtcaggctggtcttgaactcctgacctcgtgatctgtccgccttggtctcccaaagtgttgggattacaggcgtgagccaccgcgcccggcctaagccaaaagtcttaagtccaaagtctcatgtgacacaaggcaaatgtctagcctaggagcccataaagtcaaaagcaagttagttacttccaagatacaatgggtgtacaggcattggatcaatgttcccattccaaatgggagaaattggccaaaacaaagggtctacaggccccaagcaagtctgaaatccagcagggcagtcattaaatcttaaagctccaaaataatctcctctgacttcatgccttacttccaggttacaggggtggctcccatggccttgggcagctccttcatgggttggcattgaatgcctgcatcttttccagattcatggtgcaagctgtcagtggatctaccattctgggctctggagggcagtggccctcttctcacagctccactaggcagtgccccagtggggactctgtggaggtggtggggcagcaaccccacatttaccatttgcactgccctaatagagatctccatgagggctgtgtccctgcagcagacttttgcctggacatccaggcatttccatacatcctgggagatctaggccaaggtttccaaacctcaattcttgacttccgtgcacccgcaggcctaacagcatgtggaagctgccaaggcttgtggcttgcaccctctgaagcaatagcccaagctgtaccttggccccttttagccacggctgtagttagagtggctggaatgcagggtgccatatcccaaggctgcacagagcagctggcccctgggcctggcccacaaaactatttttcctcctaggcctcagggcctgtgatgggagaggctgctgccaaaatctctgacatgcccaggagacattttccgcattgtcttggcacttaacattcaactccttattacttatgcaaatttctgcagctggcttgaatttctccccagaaaatgggtttttcttttctgtcgcattgtcaggctacagattttctaaacttttatgttttgcttttcttgtaaacataagctccaagttcaaactatctccttgtgaacacataaaactgaaagctttcagaataatccaggtcatgtcttgaatgctttactgcttagaaatttcttccaccagatacccttaatcattgctctcaagttcaaggttccacagatctcaaaggcatggcaaaatgccaccagtctgctaaagcatagcatgagtgacctttactccagttcccaataagttcctcatctccatctgagaccacctcagtctggacttcattgttcacatcactatcagcattttggttgaaaccattccacaagtctctaggaggttccagagtttcccatatcttcctgtctttttctgagccctccagactgttccaacctctacccgtaacccagttccaaagtcccttccacattttcaagtatctttatatcaataccccactctctccagtaccaatttgctgcattagtcaatattcacactgctataaagaaatacctgaggctgggtgaggttgctcacacctgtagttccagcactttgggaggccgaggcaggcagatcacttgaggtaggagtttgagaccagcctgaccaacatggcaaaactccatctctactaaaaatacaaaaaattagctgggcatagtggcgtgctcctgtaatcccagctacttgggaggctgaggcacaataattgcttgaacccaggaggcagaggttgcagtgaactgagatcgcaccactgtcactgcacttcagcttggggaacagagtaagactctgtctcaaaaaaaataggtaatttataaacaaaggaggtttaattgactcacagctctgcatggctggggaggcctcaggaaacttatgatcatggcagaaggggaagcaggctccttcacaaggtggagagtatgagcatgtgaaggaggaactgtcagacacttacacaaccatcagatctagtgagaactactcactatcacgagaacagcatgggggagactgcccccatgacccaatcacttccctcccctgacatgtgagaattacaattcgatatgagatttgggtgggaacacagagctaaaccatatcacgtgccttgaggaaaagttaaactactggaaagtgtttatagctgggagatttggggttcttgcttgaatgaccaggtgaaggttaattatgttagtgttcttgccttgtatattactaaggcttaccttgaagggtcactggtcccttaaattataaaattttttcacatcctttcatatgtttcatatcaatattgggttaatatttctatcccaaattttcagatgagaaggttaactgattaggttgtgtggtcagtaaacactaaaaagccaagattaagcactttgtaatacaccatgatggctacatacttactttttttgttcccaagcttttttttttttttttttttgagacagagtctcgctctgtctcccaggctggagtgcagtggcaagatcttggctcactgcaacctctgcctcctgggttcaagtgattctcctgcctcagtctcctgagtagctgggaatacaggtgactgccaccatgcctggctaatttttgtatttttagtagagatggggttttacggttttaccatattggccaggctggtctcgaactccttacctcaggtgatccgcctgcctcggcctcccaaagggctgggattataggcgtgagccaccgcgcccggccctgttcccaactttttactgtggtaaagtacacataaaatttaccattttatgtgtacatagaattcataagtgtccagctgagtggtattaaatatattcatgctgtgcatccatcactaccatccatctccagatgtctttcgtcttgtaaaactgaaaatctgtacccattaaccactaagctcccacgccctctccccagccctgagagcacacttcgtgtctccatccatctgactgctctaggtacctcatatgagtggaagcacacagcatttgccttttcgcgactggctggaagcacacagcatttgccttttcgtgactccggcttactgcacttagcatatgtgctccaggttcatccaagttacagcgtgtgtcagaatatccctcctttttaagggtgaatagtattctactgttacatacttttaacaaacataccttgagagcttactgtgtgccaggctctgagctgagtgacagcatgttgaaatgagtcatacatggtcacagtcttgcagggactccaaatccttagcaattgcactgcaatttttgtaagtcagctgcaaaagtctaaacacagggatgtggaaacatctggatggagcagcagactccactggagttagtagaaggacgacctgagaagctggtcttggaaggtgaacagctgtttgtgactgatgaatgggcgatgcgggtgggaaggtcgttccagcaaagggaacagcacatgcaaaggtgtggaacgaagggcctgaccctgaccgcccaggtagggggaggaagtgcagcagattgggggacaaggaggccagctgtacacgcagtcggggcaccagcccagtctgtaaacgcggcatgactccatccacttggagggtggatgcgagcagctgtttatacccatttcctctctcagtcccttttcaaaccctaaccccagttattctgtttcctcagctgaactagatgcagagcacgcccagaaggtcctggaaatggagcacacccagcaaatgaagctgaaggagcggcagaagttttttgaggaagccttccagcaggacatggagcagtacctgtccactggctacctgcagattgcagagcggcgaggcgagtgggggctggggctgctggtgtggggactcaccggctgtgcggggtggcgatggacccctctccccagagcagggcatggggcagaatcctcagaagttccgttctgttatgagaccccagcaaccaaaatgtgtgcgtcgggccacctctctcttgccctgcttttgcctcttctatcagtctaagctttagttgaagatatattttttttaatacctctaaagattacagatacagccaggcgtggtggctcacgcctgtaatcccagcactttggcaggccaaggcaggcagatcacccgaggtcaggagtttgagaccaacctggccaacatggtgaaacctcatctctactaaaatacaaaaattagccggccgtggtggcgcgtgtctctaatcccagctactcaggaggctgaagcacgggaatcacttgaacccgggaggcggaggttgccatgagccgagatcgcaccactgcactccggcctaggtggcagagtgagactgtctcaaaaaaaaaaaaaaaaaaaaaagattacaaacacaaattatgcttctagagaacctgcaaaattaccaaaatggaaaaaaagaaaaatagcccttaattctccagtacagaatagtccctgttactgcttttcgtgtgttctttctagtctctgtcgagtctgcttatctaattggtatctgactggaccgtacatatatatggctttgtctctaacttttcttcatgttacatagggctctttccgcctgttgttaaaaatactataagaggttgtgtgtcaaaggctgcatctttttgtcatgatgtatcctaatatattccaccagttttcctagctgaacatttaaaatctttccctcagtaaatagtgctgtaaggaacaagctgattagaagtccagacaccgaactccttcttcccagcttttcctttggaagaactgagtgactcagaggtgcagcaggggtgggcagggcagcggcactgggcagcttacattttccctccagcctgcgctgcacaggcagtaccagacccccggcagcggggagacccgtccaaaccttgccctgttttcctgccctcccattctcctgaacgtctcatcatcttctggacacctccctcaccccccaaatctcagccttcatcctttccccagccttgcctggccctggcctttgttctctctatcctgcccccaaccacatctcccaggagtgtttcttccttgtcatccagttctgtgtcccctccaaggagaggttaaagaaatccgagaatgaggccaggcgcagtggcatacgcctataatcccagcactttgggaggccgaagtgggtggatcacgaggtcaagagatggagaccatcctggccaacatggtgaaacctcgtctctactgaaaatacaaaaattagctgggcgtggtgacatgtgcctgtagtcccagctactcaggaggctgaggcaggagaatcacttgaacccgggaggcagaggttgcagtgagctgagatcgcgccactgcactccagcctggcgacagagcaagactccatctcaaaaaataaatacataaataaaaagaaatccaagaatgaggaaagaaaataatgttgagaaaaatagattaatagcagtagttgaagacttcagagtgtgctggtgaatgcagtcagttagttgtgtggatgatgcttgtttaccttccaatgcacagtatagatttgaagcttaacaacgttctctggagtcagcctttgccattcttgtatcctgcgaccctgcatttgtcctctgtgcgtttcctccgagcatacgtgcaggattctggtgcttccgtgtttgctgcaaattgtagagagtggcttcccatggctcctttgggaggaaggagagggtttgctccagggatttttatcctgttaagggtagaaaccgagaaggacactgtcttaccccagctgccataacaaaacaatatggactgggtgacttcaacagcagacatttattttccctcagttctggaggcctcagatccaagatcagcatgctggcgcgatcggtttctgatgagggctctcttccttgcttatagacggcccccttctccctatgtgtgcacgtggccaacagtagggtggagctctctgctatctcttggtattagggctaatctcaaccacaggggccatgtccatctgacctcatctaacttaattacctcccaaaggccccagctccaaatatcctcatattgggggttagggcttcaacatacaaattttatggggacacattcagtccatacagatacaccctggccgacccacacatttgaacataatgacacatcgcaccaatgtctcatgtcatagaagagatgcagtgatgatggacagtcatagaaactctgattgctaaacaatttaactctatcttccttcagtttagcacttgctggtgagcccagaggaagcacagagaaatgaaagtgcctctcaggaagctcccattgtagggagagccgtggatgcacccccgagaggatgatgaagtagtagacgcgtggccggcttggaaggagcagcttctgttgatggccagcccctggtgacagggacgggcacgtactgcagttgctccacagctagcaagtcagcgggctggcagagagaacgcgtctagcagatacctgctggaaatacctgcaaggaaatatgaagtggttaaatttttgtggttttgagtatctcaaagattaagtttcaagaaaatgctgggctcatttttttaaggtaaaaatcaggcacatgtcgccaatatatggttttgaaagctttgaagaagaaaattggcggccctgggctttttagctttctcttgagctagagctgagagacagccacacacgggaatcgggcatctcatcgcacgtctgtgcagagccggctcagacttcccagcctgatgagccacagcacctttcttagggaggaatcttcatctccaaggattagtattaatttaggagaatcaatcaaaattttaaaaactctacagcgaacatggtgttttggactcattccactaaatcagaaatagcagttggaatttcactttcagaagcatcatttcttaattaagacaaggccatggaaagttttatccagagaatcatcagaggaaggggtgaaggcacatatgtgcccacttggatggtgctgaggccaggtggccccccaagcacagaggctctcaggcttgaggactgaaggcggtgccgggagggctgagcagcagagggggcctgggccccaccacatgccccacaggcctctccatgccgttaggatataattagatgttttgtaaggccctagcccaggtttgatcttctgcctgacatgactgccattttcttagaaaagcatttttattgctttgattttattgctgagtgtcaggatatcctgcagttacttattaataaatcacctcggagatgtcctggtctgtgcctgggttttctggctctgtgttcccatagatgtcaggctcttgtgtttctgaaccagtagttcagcaaaatggaatcctatggagccaggggtgtccctgcttccagagggattgatcagctctgggatgctccagcgtggacccagtgccctgggaagagaacgaggtttggggctaatgataaaattacaataaagttagaaaagatagaattaacaggcaacagtgcacctaagtgctatgattttgagaatcatccatactgatatattcacctctaatttgatttccatccttaaatatttatttccattgaataaatgtaatttattcattgatgtattgatgggtgtttccagttttcttatttaataaaaacaatgccggcatggacttttgtttgttttaggatggagtctcactgtcacccaggctggagtgcagtggcgtggtcatagctcattgcagtctggaactcctgggttcaagtggttctcccacctcagactcccgagtagctgagacgacaggtgtgcaccaccatgccgggctaattttttatttttttggagagacagggtctcactgtgtggcccaggctggtctcgaactccttggcccgagtgatcctcccacctgggcctcccagagtgctgggattacaggcgtgagccaccacacccggccttggacattcttataatttctctctctgtacatatacgtaagagttgctttaagaccagctgttctcaggcttgagcagtcccacagtcccctggagggctgttcaaacatggattcctgggcccactgcaggtgtgaggtggggcctgaggatttgcattataaccaagttaccaggtgatgctgaggggaccacactttggaaaccatttctttagggtatataactaggagaggaattactggtcacaatgacatggctgtctttcatttcactagatgctgtcaaatttcttgccaaaacatttgcaccagtttatagtctcctcagccacatatgcacattctgattacatcttcgccggcacttggtagcatcagatttttaaatttttgctaatctgttggaatgaaacgacacctttggcagtttctgtatattcaggaatcttcaagcctctcttttcggctccattcttctgccgcccgtccctgagccaaaaccatactgtagtctacttagtcatcaagtgttggttctcagctggggacacttttgcccccaaggggacatttggcaatgtctggagacccattttggttgtcgtgcctggggtggtaagggtgtgctattggcatctagtgggcagaggccagggatgcagttaaacaccccacactacccaggacaccccacaaccaagaacgatctggcacaaagtgtcaggagtgctggagctgagaaaatgttttctagtgaagcttgagtctgctggagccattcctgacctgctctgcacatctgtgtgcatttattttcttcatagttgccatgactcttcttggggtcttgtccgttggtataagtgttacagtttcaagtttgttgacgaaccttgtctacagtttgagcggaattgcagtaagtttctgcacggagacacactggacctcttagtggtattggatctttctgcaagtgcacgtgtctcatgcattcctgagtgttgagtagaacttgcctccaatgctgttaccagtgactactctatttgaagagttacctattctttttttctgatagttatagagatttactatttctcgttaattttggcaagttttccatggaattgtctttagttgtcagatatgtcagcataacgttgtccatggtgtgcgtctcccccttagctgtgttcctggttaggcttgcttttgcatgtttaaaattgttcatgtgccttttattcctttcatctctatttacgatgagtcttacccagaacataaccatttttaagcttttttcccctaaagaaccagcttctttgttctttctactgtttcattaacttctcttcagtgtcgctttctttgggctattgtttttttctaacccaagttgaatattcaggcttgattttcagcgttcctctctagtaaggcattcaaagctatggatttcttgcaggggtaccattttagctgaatcctacaaattttgacattcataatttctgggtaaattttatcattagcatttcatatttgatttgtgaactgtttataaatgttttttaaaaataattagatgtgtgaaagttttcctagcagttaccaatttctaactaaatttcattgtgattggagaatgggatttcgatttctcttactaactttgggactgctgatgtcagtcatcaaataggtatagtgacatgcccccaagattatggatattatgttttcattgtcattctgccatatttttactttaaaaacgtaaccaaaaatagaagttttagattatcttcctggtgaattgaaccatttaaaagtcattaagtactactctttatcccaatattacttttgtttcccattaaaatctattttgatattaatacagctgtatcagctttcttcttaattatttgtttcctcattatatcttttcattttttaagaaacatttgcatgtttctgtgtctccatatttgtctcctgtaaacagaaggtagctagattttattttagtttagttgtataatctcttaactgacaagtttggctcattgacatttcctgtgatcactgacacacccattaccatcttatttgttgctacagaattttcctgaaagcttttcttatgcttcttagtccagttttttctctcctgcccttttcaagaagatggcacagacaaactttcaaaactgaagtcagaagccacgatctaaaagacaggccttggcgaaaggcttccgtaggtcagaaaggaaaccctcagaagcgtgcccccaaaaagaacaagcctgaccagcgtgccttcaaattcccctgaccactcagccttgaagatccagcccagcgaactgctgtccctgtgcggctgggctcaacccccggccaagtccgaggcagagcaggctggctcagttggcgagggtgatgccgccaagcatgggatcatctaaaccataatacttttccccaactaaaaataggaattactcttacctctcattcaagtgctgaactttagtgattttctgagcctgaggataatgagactcactttcctcccagatgaagccgcaatctcacgtcgctgtggctctaagcaccctcctctccacccccgtgtctttgttcaggagggtaatttggccttggtgactcctcgttatgactgttccattccaggttttacattaactcacacactcacacgtctctttgcttaacatgctttcttgcactcagcccttccttcactatgcctctagcgagagcaggctcataatgacgtgtttcttcttggtctctgcttttctcctggatcttaaacgatacctaatgttacaccattttagagatgacatttctctctcctctttgaacttactccgcagtcttctggcttttattattgttgttcatgagttgcctgtcatcctaattatttccttctctttcttagcctgccctctctctctggctgccttttagagagcctttgtcttttgatgttcttcaacttcaaagcaattggtgtaggtgaagattgctttgatcttgcttggaatgttttgctttttaaatctgggtcctgaggtctttcatcgatttgggaaactcatcagcttctttgaatagagttatctccccttcttggcttcggggaaatgtgaccagatgctacgcttctgcatctttcgtaccttttatgctctcttgtatttcctttctttgttcttctatgctgcattatggcagatttactcatcctgccttctagtttattaattttctattgggctgtgactgtgccccgagtttgagatttcagtctcttctacctagtcattatttggctttcaaatgtctgtccttatttttgacaccttgtttttgacttcacctttcctgtgactgtggtgtatgaacagccatctcatattcttcagcgaggatgatgtttgtttctgctgcccttcactcggagtggctcatttcatgtgtgttacaaatgccagattgggttgggattgactttgtttaaaccaaggttaagggagagtccttccagaaataatttgcatttgcttctgccaggcattccccatggctaggataacttacgtggcttgtggttttctggaccatagaggtcgtttgcctatgagtaaagacctgtggggcatcccgtgctcagtgcccgggcagaggccaactaggcatgtgctgtttcatggggtcgccgtctgctggtgggctgggttttgttttctcctagtctgtgcttccactgcagggagctcttacagcttacagatgtaggtcaaaccccttctgccgttaggcccgagaaatgttccaaggccagtggaaactccacttgcaattagaggagtgcgcctgccgggaaggttcagggcacctgtaggcaggaagcagagctgtggctggcagggaggaaggtcgctaactgttgctgcaggaatgttggcctctttgagacaggctgagcgtcctactcaaaacagccgggactcacttaatgcagagattagtcttcagcgtcccaaagggctggggatgaacagattaaggaagtgtaaaaggtaataatagttgccaagggtgatttaggatgcatttaaagtgccagactggcatatgtcatctactaatacgttgcttcaaattccattttgaaggaagcttaggaaatgcaatgtagttagcctaatgccaatggaagttcaccttttaaagtaatattaaagacagcgtgtcctttctcgtgttgatctatccgcagagcccataggcagcatgtcatccatggaagtgaacgtggacatgctggagcagatggacctgatggacatatcggaccaggaggccctggacgtcttcctgaactctggaggagaagagaacactgtgctgtcccccgccttaggtagggttgacaaacttgcattagctgaaccagggcagtatcgatgccactcccctccaaaggtgagacgtgagaaccatctgccagtcacttacgcataaacccccaagctcacagccagctcctggctccctaaccccacggttccacacggctgtgtggcagctgcaacagtggtgtggttccgtcatgaattcttctcaaagatttgacatgctccactccggtaactttggtgagttgagagctttcttgtttgttttccctcctttaccacccagaaatccatttgagtctgctccttgtggttaaggactggcgtttgcagggaggtgcggactctcctgcggggctcacgggaaactcttccctcttcgtgcgacaggcatttaggggcgtgcctgccatgggcaaagccatggtgtgtgttcagctcttggcctgtgttgtaaacttagttgcacttcagttcctttcatcccttcacaaaattttgtttcacattcatgcagcaaatatgggctgaggtgccagacctgtacctgggcttggtgcgtttcaaatttcagaccagttctttgggctgggtcaaggcaaagctcagtcgtcccagcagcacctcagccatctgtagaaggttctaccattaccacggtttcagcttcctctaaacttctcacccgcttctcctggcaatctgtcagaacggtgtcatcctggggaagagaaggagcttgggtgcatttgccctcatcctgagaaggccagaatactggagaccagcgtgaaccctcacccagagtcaggggaagatttagaaacagtgacacctgcatatagaattttgattccttgaagagcctatttagttccataaaattggagaactgctgaaggtcagtaattccgactttctcagcagtggtgtctctgaattactgcaaagggtaaaaaaaaaaaaaagaaatctagattatcaaggttacaaggactgctcctcaaagataggcagcacttgcctttgggcctctattacacgcgtattacagccttaggagcacttgatctgtgtcacatgtggctgactccttaggggacagaagggtcaccgcagggcctgaggctgcctctggcatcgctcagctcagtgtcttccagggcagttcccaagttctgcaggccccaggtgcctggaacaaaaaccacacccccctttcatgacgggcacattccacagctgttggcggcaattctgattcacaatatttttatgacagggctttttcttccctacgttattttgcagggcctgaatccagtacctgtcagaatgagattaccctccaggttccaaatccctcagaattaagagccaagccaccttcttcttcctccacctgcaccgactcggccacccgggacatcagtgagggtggggagtcccccgttgttcagtccgatgaggaggaagttcaggtggacactgccctggccacatcacacactgacagagaggccactccggatggtggtgaggacagcgactcttaaattgggacatgggcgttgtctggccacactggaatccagttttggctgtatgcggaattccacctggaaagccaggttgttttatagaggttcttgatttttacataattgccaataatgtgtgagaaacttaaagaacagctaacaataaagtgtgaggacggtaaa

SEQ ID NO: 16 - DNA, 85356 bp, Homo sapiens
gcggccgcggcgcggagccgagcgggcgtccgtcgccggagctgcaatgagcggcgcccggaggctgtgacctgcgcgcggcggcccgaccggggcccctgaatggcggctcgctgaggcggcggcggcggcggcggcggctcaggctcctcggggcgtggcgtggcggtgaaggggtgatgctgttcaagctcctgcagagacagacctatacctgcctgtcccacaggtatgggctctacgtgtgcttcttgggcgtcgttgtcaccatcgtctccgccttccagttcggagaggtgagtagcggcgccgcagcctggaccgggcgcctcgaccctgcactgccctcgccgtgccccgcgatgccccgatacagtatgtattttttcattattagagacggggttttgccatgttgcccaggctggtctcgaactcctgagctcaggcgatcgccctgtctcggcgtccccgagtgctgggattacaggcgtgagccaccgctcccggccaaatacagtattctttatcataaacgtgtgcagagactatgagcaagtcagaactggaaaaaggcatgtatgtgattttagatattgctccctcgcccaccgttttttaaaaatagagacggaggtctccctatgttgcccaggttggtctggaagtcctgggctcaagtgatcctcccttcttggctttctaaagtgctggggttacaggcatgagctaccgcacctggcccaagaaagccacttttagcaacggggaggaaagctgtatttttaagtggtttgaaatctgttccttagttttagtttttttctttttcttttttttttttttttttggtaggaggttacaaaaggttttaaaatttaacagagtagtttttagaaatgccacagtatacatttgcttgaagtctttacccatgctggattgtaagctccgtaagagaaggtgctgtctgtaaatactgtaaccctggcccaagcacagtgccaggtactgccagagaatgcagtgcaagtgtttgtttaatggctaaattatatggcatgaattctgagcatgtacttttttagtagttcttggttctagaggctgggaaaaaatgtcttaccataagggtgagaaagctccagatttgtaagtgtgaaatatgtacttaatattatagtacttgctcgtctttgtttcatgtgttgcaacttaatgtatctgtgtgtagttaggtgccttattgcttttgtgtgatttttttggccttgattaattttgagttaactgtttattaagtcccatgcagtgtgaagatgacttaaaggcatcaggtgttagaattcttcattttattttatttttttgagacagagtcttgctctgttgcccaggctggaatgcagtggctccatctcggctcattgcaacctctacctctcaggttcaagaaattctcctacctcagcctcctgagtagctgggactacaggcgcgtaccaccatgcacagctaatttttgtatttttagtagagatggagtttcactatgttggccaggctggtctcaaacttctgacctcaagtgatctgcctgccttggcctcccaaagtgttgggattacaggtgtaagccaccgcacctggcccgaatttttcattttatatccttttctttttgctttcattccatgcttggctgtttaccaaaagagagacattttgttgcagtcctgaaatggccacagatcataaggtttggaacagacaagagaaatgagaggcagacagtgccaacaggtgtcatgagaggtgaaggcagctggcctgtggttaacttgtaaggcataatggaaaagaggagctgcatgattaggcagatttggccttgattgctgactccagttgataatgatcataataatagctaatacttatattggtcttaacaggtatcaggcactctcttaattgctttacatatgttaactgatttaatcctcacaacatcacccctgtgggataggtgctattattataaccattttataggtgatgaaatggatgcatttgcattagaatccagctaatttgtggcagagctgggcttcaaaccaagccaggctggctcagagctgtgcttttttttttgtttgttttttgagatggagtctcacactgtcacccaagctggagtgcaatggcgcaatctcggctcactgcaacctctgcctcctgggttcacgtgattctcatgtctcgcctcctgggttcacgtgattctcatgtctcagcctcccaagtagctgggattacaggtgcgtgccaccacacctggctaattttttgtatttttagtagagatggggtttcactatgttggccagactggtctcgaactcctgacctcatgattcgcttgctttggtctcccatgggattacaggcgtgagccaccacgaccagcctaagctgtgctcttgagcacccctttttatggtttctcaaacagcccaggctgttccttgtctgatcttgggaaggatatttaacctctctgagcttccttatctttgaaatggaggccagattaccttccttgcagggttgatgaggattaaataagatgggtatgtaaagcacctcacacagttcctactacataacagaccctcattaaatggtcatggctactgctgctattatattatcaactcttttatgtccttaaaccttattttgaaatatatccttgaatcagaatactttgatcatatagttaatattaccaacttgttaataatctcactaattgtaatggattgtaagctcactaattgtaagtccttttggactaagaagatcattgttttttttgttttgttttgagatagagtctcactcttgcccacgctggagtgcagtggggtgatctcagctcactgcaacctccaccttccaggttcaagtaattttccctgccccaccctccggagtagctgggattataggcacccgccatcacgctagactaagtttttgtatttttagtagagacagggtttcaccatgttggccaggctggtctcaaactctggaccttaggtgatccgcctgccttggcctcccaaaatgctgggattataggtgcgagccactgtgcctggccctcagaagatcattgttaactgtaaatttgttatcgtctcctcctctcaatataacaggtatttgatgctgtattttgataagccttttctatattcatccaaacttcgagaagtagaattgagggaaggaagtatcaaacaaaacaagctgggtgaggtggctcatgcctgtaatcccaggactttgggagactaaggctggaggattgcttgaagtcaggagttggacaagcctgggaaacaaaggagaccctgtctctacaaaaaaaaataaaaataaaggctgggcgtggtggctcacacctgtaatcccagcactttggcaggccgaggcaggagaattgcttgagctcaggagtttgagaccagcctgggcaacatggcgaaaccctatctctgcaaaaaaagtagagtagtcccagttgcttgggagactggggtgggaggatcacttgagccctggtggttgaggctgcatgagccgtgattgcaccactgcacttaagcctgggtgacagagtgaaaccttgtctcaaaaataaatacataaataaaaaaagttagctaggtgtggtggcacatgcctgtagtcccagctgctcaggaggcaggaggctgtggcaggagtgttgcttgagcccaggagtttgaggtgcagtgcctgtgattgtgccatgcactccagcctggtagacctggtctcaaaaaaaaaaaaaaaaaaaaaaaaaaaacaactcccacagggagagccttcagaatggggactagtggtcacaaaaatgcattgccttggactgtaggtagcaggtaatcagtctattgtaaattagttagctccacaaatggtgttactagattgactgctcttaagatcctttttagcttagaaacttctggtttttaaataatttgttctctgttagttgctactgtatagattttaaaacgtgtttttgagttaaaatttattatttcagggccatcattatttaatcgaaccatttatatacaagtccacaattcttcacactcaggaaaatacagactatacctagcctcaagtcagtttagtcattttgccaccaaataagtacagggcaggtcaagtttagttgccaaataaggtacaaaaagatctctaggtagggctggtctgttttgaaaaaaaaaaaaaattaaaaatcagaaaaataaaattaaaaaaattaaaaattagaaacaaaaagttgaaagcccctccagtattcagagcattttggatttcaggattactaatagagggttgtagatcagtgtgtatatgtgtatgtgtatctgtgtgtgggggtatggtgtatgtataacgtatcacttcctttgtgcactaagtatggaaacaaatatccaagaattaacttgcataaggaagcaaaataggttcacatagaatctactcgtaatgaatggtaatttttccgtgacctctctgctcccttttgctttcctgcttttctgttgccattttgaatcaatgagttattttctgtgaaaaggagaattgaaaactgggtctagctcaagttatgttcagcctcagtggtgaccagtgtcttatactggccttatttcaagaaattagttatcatttttgtatttgattagttcactcattaaacagatatatttgagtgtgttcttggccaaaggcaacaaacagatgagttagaaagaggcctggcctgagagtggggaccgtctggcctgctcctaggtgcagcacaaattgtgatcctcagtggttcccaaactgagttactcccagctgccttgtgggttgggagtagcccctcttatctatttcgtgtggacttgttttctgggaaaggtttcattgtttaaaaaatgtttacaaactatgagactatatttctaagagcctcattttagctttaatgttttgtgaatatacatttattggatacttcacatgagaagcatgacttgtaatggattttatactagagatgccaatggccacacagagcctttttaaagggtctctttgttttggggggtttgtgagaggtacatagtccagctaactatcaaagtagggaccttgtcttattctctgctgtattcttagccactagaaagtgattggtacccagtagatgctgaataaatacttgatggatgcatgaatgaatggattgattaattgggttgatcttaactgacatcctttcaaatttatttcaagtaaaggtaaattttttgctctgatgtagcgtttatagttcccttttatttctcaaatgtgattgatctgatataacttgaacattttcatgctctgagagtcattcctgctctggtaactttctctaaaaatctgagacctgttgttagactgtacagtggaagatgctgtcgtcagaatatacagtggaaaatgctgtcagagatacaaataattatagctcatgcctttggctattgtttagttgagatgaggccaagatgtatgtatgaggactgaataacaacacaggggaataagcaattgaatgcctgagttagtacacaacaattgcttagaaagtcagaagacagaagaatgttgtgggttgaaacatcctcgaggcagttctgacaccttttcaaggaggcatgagctttagggaggcttcatggacaagtaggagtttaaacagaagagagacaaggaaagattattttaggaagtggtgggagtaattttagcataaagttggtaatgtcagagaagtttgtgatcgctttttctttttgaattactagtggtttaacattgcagctagaattagttaacagcactaggttgcaagtgacagactcccaactcagacctagcttattaactagtttattattaaccagtttgttaactgggataattgaaaaatataggatgaggccaggtgtggtggctcatgtgtgtaatcccagcactttgggaggccaaggcgagttcgaaagcagcctggccaacatggtgaaaccctgtctctacaaaaaatacaaaaattaactgggcgtggtggtgcatgcctgtagtcccagctacttggtaggctgaggcaggagaatcgcttgaaccctggaggcagatgttgcagtgagccaagattgtgccactgcactccagcttgggcgacagagtgaggctctgtctcaaacaaaacaaaacaaaaaggttaaccaaaaaaaaaaaaaaaaaaaagaaaatatatatatatatatatatatatatatggtgaaatttctggcaggagtggatcgaggtgctcaaatgatgtcatcaggaatctctttttgtccctgtttctcacctctgccttcccctctttagtttacttctcagcaagctctcctcatatgagaacaaggattgctgctggcaaccccaccttctgttctaccagttcagtaactgcagcagaaagatagcttttctttctcattagtgccaactagacccagggctgcctgcctagccagaggaatgagtgcccttgttatacccttgttaaccactgggatcgtctccagaaataggggagtgggtggggctgtcagtctcaactgaaccacgtgaactgagaggagagcttcagaagataatcacaaggctgttacccaaagaagggccggaacaacagatgtcttgaagacactggcttcagtcaaaacccatttcctctccctggctttactggtgacattgtgtctgtgatagctgttagccctttaccttgctctagaagttgtaaagtagattgtttctatttttaatatctggttaattaatctatctgggaaacttgttttcttgcatggatatattaatatggagctttgttaaacacagctcaagtgtgccgttataaatctttcagtgatgatcaaatatatacctttaacttatatggtgatttgataattgcatttggtctttctcttgagatctaaatattgttcattttgttaatgaatgttatcacattgtgagagaaaaacttaacctgactttttttttttttttttttttgagacggagtctcgttctgtctcccaggctggagtgcagtggcgcaatctcagctcactgcaacctgcacctcctgggttcaagcgattctcttgtgtcagcctcccgagtagctgggattacaggcacccaccacaacacctggctaatttttgtatttttagtagagacggggttacaccatgttagccaggctggtctcaaactcctgacctcaagcaatttgcctgtcttggcctcccaaagtgctgggattacagacataagccactgcgcctggccttaaccatgcctgctgcctctccaacaagctctagatccacacttcctaccagctgcctacaccgcatacctggcaccctgccttcctaagactcggccttgttcatcatggcacttttccgttcctaagcccagatatagtttcagaataatttctctaacagtttggtgttcctccaacttttgagaggactgtcagaagatggaggaagaacttgacccaggacctcagcagtcctttcctggcattggtcccagttatgcttatagagccattcttaagcaaatctcttgaaaggagaaaggggttacttttagaccaatctgacctacctctgaatctcgggactggtctcccaaatatttgttatgtaggggtaggttcctttatggaagaagaatagataagtgatgctgggtaggcagctggctgtaattgtcatgttgaataagcacaccttgtgggatgtgtagccaatccctttattctttatcttccactggctctttgtattgtcttgcacccctgcccctggatgaaaattcaggtgggcctgatatttctgtggtcacttcacactacagaacagaatgtgaattcagcaattagagtcttcagtcctaaagcataacagaacttaaagcctaagttccttctcccagtacaggcctgctgcagggagaaagcctgcagtggaggaagggagggtggccacagtgggcatcttctcacttttcatcacttgatgattctctttctgctctgtaacctgtttctgatccctcctgtgttggagcacatgaaagaaaggaaggaaatgaggacaggaaacttcttcctgaatgagtgcaggagctctctgggatgttgtgcaggtgttagagcttattctttctttctttctttcttttttttgagacggagtctcgctgtcgcccaggttggagtgcagtggcgcgatctcggctcactgcaggctccgccccccggggttcacgccattctcctgcctcagcctcccgagtagctgggactacaggctcccgccacctcacccggctaattttttgtatttttagtagagacggggtttcaccgtgttagccaggatggtcttgatctcctgacctcgtgatccgcccgcctcggcctcccaaagtgctgggattacaggcgtgagccaccgcgcccggccagagcttattctttcttgagtgttttcaaggggcatccttcagagaccacagccaccgccgtgctcaggagtggtcacctgcttttcccctgatgagaccaaatgcctcttcattccgtttggttgcttattccttccatagatcctaagaatctgataataatgggagcttctcatttcagcctcttttgcccagtgagtaggcccagggtgaccttctgctggttctttgttgtatgtggcccacgtcctttgctcagactaggggagggtgggctgattccagcggagtgacaacttctctcttgtcctcagagcaattagccagccagcactttatatttttcaggtgttacacagacatggtacccacccaacttcatggacccatagtgagttctcttggtaattttgttgagcccttttcttgggcgtaaggaagtgggaaacagacttccactgctcccccttgaatgaggtggagcaggcgtcacagaatgccagctacctctgaaaacctcctctgatcgccacctcctggacctttctaccatgatttggatgagtctgcaactgttccttaagaaactttgcatcttggcccaacacttcactttggaatgtggtatcttgtattttgctgcctcagaagaaacttatttttacatgcacagcttctcaatttggttaccagttaattgagcttgcctgggagatgaaacttatttgctatttctgtgctcagcatcctggtcacaaagatggaatcttccttatcttcaaatccctgtgccctggcagagtgcctgcctcattcattcagtgactacttaatttttgagcactgtaccaggcccctggggatccagcagtgaacaaagcagacttggctcctgctgacaaggagcttatattctggtggtgcagtcagacattaactgccacttcattactattgtgagaaatgctgtaaagaaatagagcatcgttgtggaagagaccagcagtgagaatcagtttggtctggtggcaggggatcaggagatgcttgcttttttttttttttttttttttgagacggagtctcactctgccgcccagtctggagtgcagtggccactatcttggctcactgcaacctccacctcctgggttcaagtgattctcctgcctcggcctcctgagtagctgggattacaggcttgcactgccacgcccagcaactttttaaatttttaatagagatggggtttcactggttggccaggctggtcttgaactcctgacctcaggtgatccacccacctcggcctcccaaagtgctgggattacaggtgtgagccactgtgcccagctgggagatgctttcttgcttgatgctgtttgagttcaaccgtagagggtaagaattgctgaggctgaggacagaggaggtcaagtcagctctaggacagtggttcttagctaggtgtgattttgccaaatgtctagaaacatttttggttgatacagctggggcatggcatggggttgatgctactggcatttagtgggtagaagccagggatcctgccaaacatcctatagtgcacaggacagcccctacaacaaagaatcatccagcccaaaatgtcgatagtgctgaagttgagaaatccggaattagaaggggcaagaatggctgcagggcagttagtctacaggactggcctgggactaggtcagtggaaggacataggaagagaaatggacagattcaagaggcttaagaggcaaaatcctccagtccttatgttccattatgtgctaggcactccaccaacatcttgggatacaaaagtaagcgagatagacaagttcatttgctctcgcagaccctacttgtagttcttaagtgaatatttgttgaatgaatacttataagcatcaaaatttatttttgttgctgattgtgactgaacttaggaagagtagtttaagtgaggtgcctaatgtatgtaagacatcttgcgtagaggctggtcctaggcgttcagctaattaagtgccaactgtcccatctcaggattgttttccatgtggccagagtgctcatgaagaaaggacaggagaccaccctgtgagcttatgcctcttaatctttccttaaatacagaacaggagaactcacagtgatttcttgaccttggtgtgctgtgttatgattgctatgaaatcagagggagcaagtcctttatttaatatagcttgtactgtatactaatatatgtaggcttcctatagttccttctaaaatataacaggtgtaactataatagattatatatattcatgatatatctttttaaaatttctgctgttctttagattgttctcatcttgcgatacagatgcagaatcttcagcagttgattagtcagcctatgtgtgattcgtatgcatactaaattacacaggaaaaagtgatctttcagaaagaccaggtcaggtcacactcattcagggagtgaaactcattctatgatcagactaaaaaccatattgcccactttaagattacttctcaaaattgcttcatttttttaggattctagtttttctttttcctttgataaacctttttcccccccttcattttctcacttcatttctgtctctcattaattcccaattagataaagcttctaaagcaaattttcagaagttgttcatgtgacaggcttatggaggtgttcactttgggccagtgtattagtccattttcatactgctgtgaagacatacgcgagactgggtagtttataaagaaaaagaggtttaggccagacatggtggctcatgcctgtaatcccagcactttgggaggccggggcaggtggatcacctcaggtcaggagttcaagacgagcctggcgaacatggtgaaaccctgtctctaccaaaaatacaaaaatttgccaagtgtggtggcgggcacctgtaatcccagatacttgggaggctgaggcaggagaattgcttgaacctgggaggtggaggttgcagtaagccaagatcgtgtcattgcactccagcctgggcgacaagagcgagactctgtctcaaaaaaaaaaaaggaaaaagagttttaatgtacttgcagttccacatggctggggatgccttacaatcatggtgaaaggggaaagaggagcaaaggcacatcttacatggcagcaggcaagagagcatgtgcagaggaactgccctttataaaaccatcagatcttgtgagacttactcactatcacaggaacagcatgggaaaagcctactcccatgattcggttacctcccatcaggtccctcccatgacacatggggattatgggagctacaattcaaaatgagatttgggtggggacacaggcaaactatattagccaggttgtctactgttgactaaagacacaaagggctgggcacggtggctcaggcctataatcccaacactttgggagtctgaggtgggtggatcacctgaagtcaggagtttgagaccagcctggcaacatggtgaaacctcatctctactaaaaatacaaaaattagtcgggtgtggtgtcaggtgcccgtaatcccagctacttgggaggctgaggcaggagaatcacttgaatctgggagatggaggttgtggtgagccgagatcgtgctactggactccagcctgggcaacagagtaagactctgtctccaaaaaaaaaaaaaaaaaagacacaaatatatttaagttgctttctgctctggaggaactcatagtccaggcagggaggtggacaggcaagtaggcaaacttgaaatgtgttgtgatgaatgcagtgccaagcacactttctcagatggtgtgatacctgagcttggtctggaaggagatggctgagtaaaggaaggggagtgtttttgtttgttttgtttcttaaggaaaagatgccattggtgtaaaggtatggatatgagacattattaacttctaagaacaaaagtagttctaaagggctgcagcatctttggagtgacaggggaatgaagccgaagaggcaggcaggggccagtttaggacttgcctgctgggtggtactaaggaatgtgaattcatcctgaagaaaatggggaccatcaaaggattttaaggaagagagtgatgaaataaaatctgtgcttagaacagttgctctggaggtaatgtggaagatgaattgcaggtgggggaaaacgggcaacaggagacggggtgaaaatcccacatcaagtataatgcttcagaatccacaagcttttttgatatttttattttttgagacaggatctcgctatgttccccagactggtcttgaactcctgggctcaagtgatcctcccacctcagcctccccatagctgggattgtaggcatgtgtcaccttggctagctatttaaaaaattaattactttaatttttaattattatggctatataatagttatgcacatttatggagtacatgtgatatttttatacatgcatacaatctgtaatgatcaggctgggtgcaatggctcacacctgaatcccagcactttgagaggcttaggtgggtgggttgcttgaactcaggtgttcaagaccagcctgggcaacatgacaaaaccccatctctacaaaaaaatacaaaacttagctaggtgtggtagcacgtgcctgtagtcccagctactctggaggctgaggtaggaggatcactggagcccaggagattgaggctacattgagccatgattgtgccactgctccaccctgggtgacagagtgagaccctgtctcaaaaaaaaaaaaaaaaaaaaaagtggaatgataaaatctgggtaatggggatatccatcatctcaaccatgtatcatttctttgtgttgggaacattctagatcttcacttttagctattttgaaatatacaataaattattgttaattacagttgccctcttgtgctgtcgaacaccaggactatctaactatttttgtacctattagccaatcactcttcatccccactgcccccactaccctttccatcctctggcaaccaccattctattctctacctccatgagatcagttttttagctcccacatatgagtgagaaatgtgaatgcaatttgtttttctgtgcctggcttattttacttcacatcatgtcctctggttccatccatgcgctgcaaattacaggattttattcttatttatggctgaataatatcccattgtgtgtataaaccattttctttatccattcatccattgatggacacttagcttgcctccaaatcttggccattgtgaatagtgctgaaataaacatgggagtgtagatagctcttcattatacggatttcctttcttttgggtttatacccagtagtgggattgctagatcatatagtcgttctatttttagttttttgaggaatcttcaaagtgttttccatagtggctatactaatttacattcccactaacagagtacaagcattgcctttttgccaagtccttgctagcatttcttattttctgtctttttgataatagccactttgactaaggtgagatgtctcactgtggttttaattacatttccctgataacttgtaatgttgagcatttttaaatatacctatggccacttacatgtgtcttcttttgagaaatgtctattctgatattttgccaatattaaaatcagattatttgggtttttttatgccattgagttgtttgagttccttatatattctgattattaaacccttgtcaaatgaatagtttacaaataatttttctcattctgtaggtagtctcttcattttgttgattgtttcctttgctgtgcagaagctttttagattgatgtaatcccatttgtccatttatctttggctgtgtattctctttaggtcttactccgtaagtctctgcccagatgattttcctgaatttccccagttattttcttctagtagtttcaagtttcaggtcttagatttaagtctttaatccattttgattgagttttgtatgtggtgagaggtaggggtccagtttcattcttctgcatatggaaatcctttttcccagcaccatgtattaaagagactgtcctttccccatcgtatgttcttggcacttttgtcagaaattagttggctgtaaatctgtggatttatttctgaattctctattctcttccattgatctttgtgactgttttataccagcaccatgccgttttagtttctatagctctgtggtatattttgaagtcaggtagtgtgatgcctcaagcttagttctttttgcagtctttcaggattgctttgcctatttgggagcagaatcagtgagcactgaatattgatttttataattgtacaaagacctgaaagtaaagtgtctttgtttttagagagaggctttttttttttttttggaacagggtcttgctatgttgtccaggctggagtgcaatggctattcacagacatgatcatagcagactgcagcctcaaattcctgggcataagcaatgctctgacatcagccccctgagtagctgggactatgggtgtacaccaccatgcccagctaacattgtttattgctgccttattgtttggctttggacaagtctctttatttctttataatatagaaggtacatcagaattcttcaaaatcacttacagtctagcatttaacagtgagctgttatgggccgggcatggtggctcatgcctgtaatcccagcactttgggaggccaaggtgggagaccagcctaggcaacatggtgaaaccccatctctacaaaatccaaaattagccagcatagtggcatgcccctgtagtcacaactacttgggaggctgaggtgggaggactgcttgagcctgggaggcaaaagttgcagtgagcctgagatcatgccactgcattccagcctggtcaatgaaatgagaccctgtctcaataaaaaataaaaataagtaagctatgatgctgccagcagttttcaaagtatagtttggggactcctgggaccccaagatatttttcagttatccttaagttcaaacctagtttcgtaataatattaggacattatttgccttttactcacattctctcatgagagcacagtggagttttctcgaggcctacaggacatgtgacattgcaacagactgatgtagaacagatattgtcttctattaaatagacattaaagagatttttaaaaattacaaagtaccgtttctcactttttttatttttgaaaatatagttattatttatgagaaatatgttaatctgtaatggctttatttatttttaaatgagtatttatttatttatgagatggagtcttgctctgttgcccaggctggagtgcagtgacatggtcccggctcactagaacctccgcctcccaggttcaagcaattctcctggctcagcctcacgagtagctgggattacaggcacctgccaccacacccggctaatttttgtattttcagtagagacagggtttcaccatgttggccaggctggtctcgaacctctgacctcaagtgatctgcctgcctcggcttccaaagtgcgggaattaacagacgtgagccactgcgtccagcctaaatgagcacctaaatttttcctcagttttaattttaatacagtagatatgaataaacataatccacatacatttttcaaagctgtttggagttctcaataatttttttttttcaagacagggttttagtctcgttgcccaggctggagtgcaatggctcaatgtcagctcactgcagcctctgcctcctgtgttcaagtgattctcctgcccgagcctcaccggtagctgggactacaggctcatgccaccatacctggctaatttttgtagtttttgtagagatggtgtttcatcatgttgcccagctggtcttgaactctttttttttttttgagatggagtctcgctctgttgcccagactggagtgcagtggtgcgatctcggctcactgcaacctccgcctcccgggttcaagcgattcttctgcctcagcctcccaagtagctgggactacaggtgcatgccaccacacctggctaatttttgtgtttttagtagagacggggtttcaccatattggccaggctggtctcaaactcctgaccttgtgatctgcccgtctcaacctcccaaagtgctgggattacaggcgtgagccaccatgcccggcctgaactcttgagctcaagtgatcctcctgccttggcctcccaaagtgctgagtttacaggtgttagctaccatacccagccagtcctcaataatttttagaggttaagggggtcctgagaccaaaaagtttgagaactgctgttcctagtatttaacaagaaacatacgttagaaaaaagaaatatattgtatctctatcacgcaaatacaaatataagccactgtcatctcttaacactcttgctccattataatccattctccagactgcaaccagagtacatttttaaaaatgtgaatcagattatatcatgttcattgcacataatagaaaatctggactcctttcaatgttttatatatgtccctaaatgtagcaccctacccacttctctgaagagcctgtatcaggttaccagtgtgtatcatgtaactatttctacaaaaatgtcttgtaacaaactatccccaaatttgctggcttaaaatggagcagcaaactccacctgttttttgtgtgggctgtaatttaataatggcttttacgttttcaagtggtttttaaaaattaatgtttcacaacaacatgaaaattatatgaaattcatactctagtttcccttcggattgcataaatcttttgccttttactaagatttccatggggctgggtgtggtggctcatgcctgtaatcccagcaatttgggaggctgaggcgggaggatcacttgagtccaggagttcaagaccagcctgggcaacatagtgaaaccccatctctaccaaaaaagaaaccaaaaaaaaaaaaaacacacacaaaaaacacttagctgggcatggtggcacatgtttgtagtcccagctactcagaggctgaggtgggaggattgcttaagtctgggaggttgacactgcagtaagccaagattgtgctactgtgctcctgcctgagcaacatagtaagaccccatctctacaatcaaaaataaataaatattttcatggagaggaacaactctgactttttgttttatttttgagacagggtcttactctgtcacccaggttggagttcagtggcatgaacacagctcactgcagcctcagcctcctggtctcaagatcctcctgcctcagcctccttagtagctgagaccacaggtgtgtgccaccaagcccagctgatttttacatttttttgtagagatgggggggttctcaccatgttgcccaagctggtcttgaactcgtggactcaagcagtcctcccacctcagcttccgaaagtgctgggattacatgtatgagccactgtgcccagcccaactttgaggtttttgctaattttttgaggccttgctttggcaaggtgatatggtttggatttgtgtccctgaccaaatctcatgttgaattgtcatcctccgtgttggagaagaggcatggtgggaagtgattggatcatagtgggggacttcccccttgctcttctcgtgttagtgagtgagttctcagatctggttgtttattttaatttaattttgttttgagacagggtctcactctgtcgcccaggccagagggcaatggtgtaatgtcagatcactgcaacctctctctgccttctgggttcaaatagttcttctgcctcagcctcccaagtagctagaattacaggcacatgccaccacgcccagcattttttttagtagagatggggtttcatcatgttggccaggctggtctcgaactcctggcctcaagtgatctgcccacctcggcctcccaaagtgctgggattacaggtgtgagccaccacgccctgcctgagatctggttgtttaaaagtgtgtagcaccggccggacgcagcggctcagcctgtaatcccagcactttgggaggccgaggcagttagatcacctgaggtcgggagttcgaggccagcctggccaacatggtgaaaccccatctctactaaaaatacaaaaattagttgggtgtggtggcaggcacctgtaatcccagctccttgggaagctgaggcaagagaatcacttgaacccgggaggcagaggttgcagtgagctgagatctcaccactgcactccagcctgggtgacacagtgagactccatctcaaaaaaaaaaaaaaaaaagtgtgtagcaccctcctcctttgctctcttcctccttctccggccacgtaagaggatgtgccaatttcaccttcgccttctgccatgattgtaagttttctgaggtctcccagaaacgcttcctgtacatcctgcagaactgtgagtcagttaaacctcttttatttataaattactcagtcttaggtagttctttatagcaatgcgagaacagactaatccacagagatagagtaaaaaagaaaaaaaaaaaaagaaaaaattatgtgaaatttaaatgtcagtttctgtaatttgagtttcattggaacacagccatgtccatttatttacatgctgtccgtggctattttcacattacagtggcagaattaaatagctgagacagaaactatatggcctgcaaagtctaagatgttactatttcgtcttttacggagaaagatttccagtccttgatttacagtggcaattacttgctctctggatgtgcaggtcattggttaactgattggggttggacttggttggctctgctccacgggtctctcatcctccagggaccagccagcgaacctggttgtgttcttctcaaggcaaaggtagaggctgagagatcctctagatactcgcaaacccttctgaggtgtaggctcagaactgctgcagtcaccgtctttttgttctttgaaggcattcaacttttcttgccttaggagctttgtactggctgttccatgagcaggagagcactccccccagatcatctggtgacaggctttcttgtcaacataggtctcagctgtaacacttcacttgggccttccccaccacctgtcccaaagcagcctctttccccaagtccttctttatcacattcccctatttttccttttttttttttaaataatacttttagtgtcagtctgaaattgtatgttgatatatatgatttcttacctctctcctttaaaatgtaggctctgtgggagcaggggcctttctgtcttattcaccactgtattttcggcccctggaagcctggcacctggaagtaagctgagcacagaaatatttttttctactgtctaaatatggaaaggtcacccatggtgagcagttgctaaatttgaccttaaaagaaagaatgtggatttagtttatatatatgtgtgtgtgtgtgtgtgtgtgtgtgtgtgtgtgtgtatgtgtgtgtatatatatatatatatatatatatatgaaattggagtagactttatattttagagcagtttaggtttacagaaaaattatatggaaggtacaggaaattcctgtatactccctctcccctaaatagttctccatacatttttaataggcttgttttatttacttattattatttttagagaccgggtcttgctctgttgcccaggctggagtgtagttgtacagtcagctcactgcagccttgaactcgtggcctgaagagatcttccttccctcagcctcccaagtagctgggtgtacaggcacacactacacctttttttgtagagactgggtctcactatattgaactcctggtctgaagggattctcctgcattggcctcccaaagcagtgggattacaggtgtgaatcaccatacctggcctgtttcccctaaaaacaccttgggtcagtgtggtacatttgttatagttggcaaatcaatattgatagattttttattaactaatgtacatagattacactaggattcattctttgttttatacagttctgtgggttttgacaaacgcataatgtcctgtgtctaccactacagtattgtacagaatagtttcactgccctgcagttgttcttgctctgtgcttcacctattcattcccatcttctccttcctccccactggcaaccactgatctttttgctgtgtctgtagttgggccttttccagaatgtcatttcttggaatcacataatatgtaaccttttcagtttgcttctttcctttagtaatattcatttaagtttcctctatgtctcttcatgacttgatggctcttttctttgtagcactgaataatattccattgtctggtgccattcaccttttgaaagacatcttgattgcttccagtttggggcaattatgaataaagctgctatatacgtttatgtgcaggtttttatatggacacaatttttcaactcaggtaaatacttaggagcatgactgtgataagcctatgtttagctgtgtgagacactgacaaactgtcttccaaagtggctgcaccatttgaattcccaccagcaatcaatgagaattcctgttgcttcacatctttcccggcttggtgttgtcagtgttttggattttagccattccattaggtgtgcagtggtatcttattgctgttttaatttgttattccctaatgacatgtgatgttgagcatcattttatatacttgtttaccatctgtatgttttctttggttgggtatcttcagatttttttacccagtttttaattgggttgtttgtttccttattgttgaattttaagagttctttgtatattttggataccagttccttatcagatatgtgtcttacaaatattttttctcagtcaatagttatctttttattcttttaacagtgtctcccagagcagagcagaagtttttttgagaccgagtttcgcttttgttgcccaggctgaagtgcaatgatgcaatcttggcttaccgtagcctccgcctcccgggttcaggcaattctcctgccttggcctcccaagtagctgggattacaggcatgcaccaccacgcccagctaattttgtatttttagtagaaagatggggtttctccatgttggccaggctggtctcgaactcccgacctcaggtgatccactcgcctcagcctcccaaagtgctgggattacaggcatgagccaccacacctggccagaagtttttaattagtacaactgatcagtctttttctcacctatggattgttacttttggtgttgtatccaaaaagttaccatcaaatccaaggtcacctagattttctttctttttttttggagacggagtcttgctctgtcatccaggctggagtgcagtggcgtgaacacgactcactatagcctccacctcctgagttcaagtgatcctctcacctcagcttcctgagtagctgggtccacaggtgcatgccgctatgcccagcttttttttttttttttttttaattgcccgggctggtcttgaactcctgggctcgagcagtcctcccaccttggcctcctaaagtgatgggattacaggcataagccaccatgcccagccatgtaactttagagtcagtttgtctatatccccaaaataacttgctgaaattttagttgagtttgcattgaatctgtagatgaagttgggaagaactgacatcttaacaatattgagccttcctgtctgtgaacatggaatttcatttggatcttctttgattgtttccattggctttctgtagttttcttcacaaagatttcatacatattcatacatattttgttagagttatgcctacgcatttcttatttttcttttttagcagggggtgctaacctaaattgtattgtgtattttagtttcaaattccaattgttcattgttgttatataggagagcacttgacttttgacttttgtatgttaactttgtttttatttgtttgttttttgagagagtcttaccgttgcacaggctggagtacagtggtgctattgtgcctcagtccactgagtagctgggactacaagtgtgcgccgccacacctggctaatttttgtatttttggtagaggtggagtttcaccgtgttggccaggctggtctcgaactcttgtcctcaggtgatccaccagtctgggcctccagaagtgctgggattacaggtgtgagccactgtgctggccttgtatgttaactttgtatcctgcagtcttactatatttgcttatttgtttcagattttgttgttgttgttgattctttgggattttctacatagacagtcatgtcatcggtgaacaaagacagttttttttttcttctattcaaaccaagatagttttatttcatccttctcaatctgtttaccttttatttcctttttttgtcttactgcatcagctaggacttcaggtacaattttgaataagaatggtgatgggaggaggagtccacacttgtcttgttcctggttttaggaggaaagcatgtagtttctcatcactaagtatgatattaggtgaaactgtttttgtggatgctctatcaaactgaggaagttctcctgtattcctagtttgctgaacatttttatcataaattaatgttggattgtcaaatgctttttctgcatctattggtatcgtcatacaatttttcttctttagcttgttgatgtgaaggattttatgaattgatttttggttgttaaaccaggcttgtatacctgggatgaatcccagttggttgtggtaaataattctttttatatattgttggatttgatttgataatattttactgagggttttcgcatctgtgttcatgagagatagtggtttataagtttcctttcttgtaatgtctttgccttgttttggtattagggtagttttggcctcatagaatgaattaggaaatgttctctctgcttccattttctgaaagagattgtagagaagtggtatcattttttttttccttaagtgtttggtaaaattcaccagtgaagccatctgggtctggggctttctattttggaaggttattaattattgattcaaatttttttatagatatagccctattcagatgacctctctcgttttttgagtttttggatcatgtgtttcaaggagttggtccatttcatccaaattataaagtctgtggagacagagttgttcataatgctccttaattttttaggggggaaggtattgtagtgatttacttttcttttaaattattgtggttaaacatatataacataaaatttgccattttagctatttttaattatataactcagtggcattagttacatatacaaagttgtgcaatcatcaccactgactatttcccaaactttttcatcgccccaaacaggaactttgtaaccattaaattcctcagtcatctcttcctttagctcctggttgcctctaatctactttctgtttctatggatttgcctgttctagatattttatataatggaatcatacaatatttgtgtttttgtttcttgttgttattttggcagttttggcttgtttgtctgtgtttacatggggaaagaaaaattgtagcagcctgttccaccattttgctgatgtctagctccagactaatagttttgattgttgctttttttatataatgttttatcaaacactttatcccttgactactttgtaatgctccacaaaggaagaaactttgttttggtcattgctatgtcctcagaatctagaatgatgccacataatatttattgactgagaaaattaagttactatgttttaaacgattgtttgaaaatgtgattttttaatagctttatcatatttatatgaatgtaccataattactcaatttcctgtttaatttttaaatcatgtttaatgatctaaacattagatatttcgtttttatcggtaataatggtgattatcgtacagaagcctttgggtggatctatgataatttcctcggcatatgtttcttgtagtggaattaaccagatcaaaaggcatgaacatttatttgtttgtttctttggtacacactgccaattgctcctcaagaaaggagcaatttttttaaatggcctagcagctattttttaaaaaaataacattcttgacctggctcaggcctgaatcccagcattttgggaggcagaagcaggcagatcgcatgagcccaggagtttgagactaacctgggcaatgtggtgaaaccccatcttgacaaaaaaatccaaaaattagccagacgtagtgatgtgcacctgtagtcgcagctacgcaggaggctgagatgggaggattgcctgagccctaggctcagtacatcaaggctgcagtgaaccttgatgacgccactgcactccagcctgggtgacaaagcaagaccctgtctcaaaacaaaaacaaaaacattcttttcaccttttatgactttttagcatttcaaattcattttttaaaagtcctcttcttggtgtattttaaaaatatttttaggtaacagtgtgaaataaaattcacttgttagtggaggtaaatacattaagtttcacaaacagatattgtgcaaaacttcatttcagtaaacttttttatgacaattttgcaaaaataaaatttgaaaatcttaatttgactagtttggcttctggtttactaattatactaaaagtatataccaagttaaaccattttttgttcatatgttggtaatttttttttcacatgatatattttaattatttgcatcatatttgtctccccagtagtctgtgagccccttgtgggttgtaataagttcagtgttgtatcataattttaataccttatacatcctatagtactttgtagttgtcagaatattttatcagctcacttgaattttctaacaaccccttaggggataagatagtattatttaaattttacagttgaaatttagggttaagttgacttgtctaaaatcacaaaactggagcttaggtccagttgttctgacttgccaccttgtgtatttttgtgacagtctttaaggtttgaatagctgcagcactaaacaaacttagtgccgtgaccaaaatctgtatttctatttggcccattatggtgaccactaactgcatgtggctactgagtgcttgaaatgtggctaggtgattaaggtagtgaatttcttatattacttagtttacgttttaaataatgacttgtggccacataccatattggacagtgcaggtctaccctcataggtagaataactatttgccaggacattataacaagaactcaaacattggctgcagagtagggcactggattcaaagttcttcctgtagaattcggtgattctgaaaactctgagcaataaaacaaacaacatagatatattcagaaagtcggtttgaatactttttgaaagtatttttggtagttcgttggttctttttttttttctctttctctcttttccttttagccaagtgtgattgctaagggttctttttgttttcttttagatatgacttttatatagtagagtgcattgtcaaagcacaaagcaatactttttttgttttgtttttttgagacagtctcactctgtcacccaggctgtagtgcagtgatgctgatcttggttcaccgcaacctccggctcctgggctcaagcaattctcctgccagtgagtgctaccaggcttggctaactttaaaaattttttttttttaaatagagacaaggtcttactatattgcccagactggtcttgaacttccaggctcaagcgatcctcccacctcggcctcccaaagtactgggattacaggcacgagccaccatgcctagacagtattcttaattctgacttctaatacaattttcttccctactccccaactggcaaacaaatctttcttttttctctactcctttatttccataaaaatctcagctctctctccgtggaaaaatatgtcatgattattccttttgtctaacagtgtttattatattttaatctgtactcatttaaaagctacacagtagtcctacatcatttcatgcaaataaatgtttaatccttaacaggaatgtcagctccttgaggacagagccctgatttccattttgtcttccttaaaaaatctgttatgttgtgtgtctattgcggtagagaatccaaagagggtagccatggtctagaaaaatgtctgagtttaattagtgtttgactaaatagtggtcatccatcttcggtttgaatcatttcctttaatttatgtgaagagaagaaatcattcctgtgttaataaccattgaactcctaattttttaaagttgtgctttattgcattaagccactttgcatcaggaaaatgggtgtctttaatcgaatgtgattagaaatgctgctggcaatcagcagattttacttcctggttaatatcataggaggaggaggtttagtagaaaagataaagcttaaaatatctttaatatatcttagtctttcttttagtgcctccatgcaaaacaaattttgttttcagaaactaagaagactttttgtaatctaggaacatggtacatttatcttttctttttcccttgttggagggaagacaaggttagagggaccttgattctgaggcagcttctaaggcctcttggcatgttaaagtgccagtctttggggtatcactttctgagtctactttctggacttttgagacttttttttttaaactcagcctaattccctggagattcattaaagttgatgagagattccatctttttcagcactcttttcgagtcctggcttcttacagaagtggcatagcccaggaggtctcctcatggtgttatgtccgggagtctccatctgccgtaactggagattaaggattttagtggttttctttttagtattgtcctcaagggtgctggcaagctgatttgccaaattaactagatcagaggtaggcacagtttcccattctgttcgggcccttttgaccagctgggagagttcttgagaaaggctgttcactaacatggaataaaaggctacttgagtagattcaacattttctttaaatacagcctggagcctactgtaatagttgtacattaggttctttcttgggcacaggcctggaggtttttccagtctaaggctttaggaagagcctcgagaacagacttgtggagtgtttttttttccttctatgcctttgactctatccatagtctttaggggtgtttttgtctaaatccccctcaggatcatggcagtgagccttgaccatccagtgttgtgcctgaccttcactgacaagaatgtgaaccacctactgtgggtcagaaaaacctggctgataaccctaagttactatgtccaattaatcagcaaattggtgagggtccccagtaacctctggaagttccctggcaatggcacgaagttcagccttgctccaaagaacaaaagaaatttggggtctagaggaattgtcaataagtttaattttcatttctttctttcttctttcctttttctttttttcttttcttttcttttttttttttttttttaagagacagggtcttgctctgtcatccaggcttgagtgtactggtacaatcatggctcacttcagcctccaactcttgggctaaagtgatcctcccaccttaccctctcaagtagctgggactacaggcatgcaccatgcccggcgaattgatttgtttttgtttgtttggttgttctgagacaggatctcagtttgttgcccaggctggccatgaactcctgacttcaagccatcctccagccttggcctcctgagtagctggactccaggtgtgcgccaccatgcctggctaattaaaaaaaattttttcttttttttgaagagacaaggtcttactatgttgccccagctggtctcgaatgcccgacttcaatcgatcctcccttcttggccttgcaaagtgctggaattacagacatgagccaccacactcaggctagtttaaccaaattgttttatttttatttttttccttcatacagcctcctttaactttaaagggacagattttggcgggccagagaaagagaggagaatagagaagaaagaaggaaggggaagtctcatctgttccagagaggaaggagtttgggtccttaaggccttgctcttttttaaatttttttccagttttttttttttttttttttttttttttgagacagggtctctttctgtcacccaggctagagtgcagtggcacagtaaatgctcactgcaacttccacctcctaggctcaagcgattctgccgcttcagcctcccaggtagctgagactacaggcacatcccaccacacccggctaattttttggagttgtagagacagggttttgccgtgttgcctatgctggtctcgaactcctgggctcaagtgatccacccacctctgcctcccaaagtgctaggattaaaggtatgagcaactatgcctggccttttttttttttttttttttttttttttgagacagggtctcgttctgtcacctaggctggagtgcagtgatgcaatcatggctcactgcagcctccacctcttgggctcaaacaatactccagactcagcctctgagtagctgggtctacaggtgtgtgccaccatgcctggccaattttttattttttgtagagatgaggtctcactatgttacctaggctggtcttgaactcctggcctcaagtgattctcccacctcagcctccgaaagtgctggctttacaggcgtcagccacctggcccttgttttttcttaactgtttatcttaattaattttgagatcgtgtcttgtagagaggcaattttaggatcctgagtgtgcttagaagcttcaaggtaccaattaaagtatgcctcccactcagatttttaattatagggctgctgtcttctatttgttttttgttttctttttattttgagatggagtctcactctgtcacccaggttagagtgcagtggcgcgatctcagctcactgcaacttctgcctcccaggttcaagcgattctcctgccttagcctccctagtagctgggattatgggcaactgccaccacgcctggctgattttttttttttttttttttttttgtatttttagtagtgatggggtttcaccatgttggctaggctgatcttgaactcctgacctcaagtgatcctccctccacgacctcccaaagtgctgggattacaggcatgagccattgcacctagccctaattttgttctaagacaagtttgcggacccaaaagatctccaggatggccatccaaattagttttgatgttctctatccattgatttaaaattgttcgcaagagaagaccataatttttttttaattaaaaaattttttataatagggaaaaaatagagacgaggtctcactgtgttgctcaggctggtcttgagctcctgggctcaggcgatcctcccaattcatcctcccaaagtgctaggactacaggtgtgagccaccacacctggccaaagataatttttgaacatgtagctagctggcagaggtcccaggagagggactatgattgcatgctttagcattttaggatcccattctgcttctcattaatctcccaagagcaaaataagaaccttataagccctgtcagggaatgtttggggtttggaccagtgtccaacaaactcaagtacacgtacaagtgtatggaaacaagtcagaacaaaaccaaaaccaaaagttctctctattggggttctcttctacaacgttggcaattctttccatagagtaccatgtgtaatgagcattaaagatctttatgcccctcctcttccctcccacccccaccccaaatctagaggctgattagagatgctgtgttttgcggcaggtagaccacttcagtgccttcagtgttgaactcatggggttctgggtggccatgggcattgtccaatcaaaagaactttaatagaagtacttactggcaaggtacttcctgacttcagagacaatgcatccaaggaaccagtccagtaaaagaactcttgttcaggttttcttgttgtacaaccaaaacactgactgttggtgttaatttttttccatcaagccttgggggttagcagcattacaggtaaggaaagcccaacagcatttgcacaaaacagtagagtcagcctgtcccttcccttcctgctttaaatcctgatgcttgcttctcttccttactaataaatgttctttgtcacatttttcccatgattaaatttcatctgtattaaaaacatgttcaggcagatatcctttctcatcgatgattttctttgggaactgatcttctgccttttggtctgcaggtgcatctcctgttatcttgacatttttaagccaaatctctttttaaaatgatcaaaccagtctttgctggcattacattctcctgctttagacccttattgtccttttgctttaagttgttatctaacaactttgctttttcttgcattatgttagtctgtaggtatgtgtttcttatagcaattctggacccacgttaaagcgcattttcaatacaagataaagaggcatttagcaaaaaatgcagttttctagctgggagtgacagcttcataatttttcattgcctttttttttaaaaaacaatgattcttagctaaattcttttgtcttgaaatggccagcaaccaccactgcagacctcaatctatggtacgtgtcaaaccattcaactttttcttgtaatgacatgactttcctctgcttcttgggagcacttccatcggcactagtggcactttctaagagtcccatgatgttcttcgcagtttacggtattgcactaaatatgaaaaatacgtaagaaacatgagagatcactttttaccgcaacatgcagtttactagagagacaaactgctcacgtggagataattagtgtcactacagatactcgcaacatgtgagctcgctgcaatagtaacaggagatgggtacaaaattattttagtacagtatatactacagttgattttattcggttatgatttattgctgcatttttatgtttgtttacctctctcaattgcaaacggtaccatgtacagtctgtgtttgtataagttttgatacattttaactttttataatataatagatttgtgtaagttctggataatgaaaacagaagtggtaggtgcagcttccatgatgtctccttaaaggtggggcatgtctttccctttcctttctgcagttggaatgaattctaaatgcctgggccccacagcccatctgaatgtagcagggccacttcttaggggcagtggaataggatgctggaggaagcctggtcaggaaggagggcatgtagagtagaaggaaaggacacacagaaagattagatagaagggaatgagctggcaaaggagatggaaaaggagccaccagggcgacaggagggaaaaccaagaaaacatttccacaaagaggaactgggcaactgctatgaatacttgagtaagagatgaggaaaatgccgttgagtttgacaatgtgggggccttggtaaggccactaaagtggtgaaaacataagtgatactggagtgagctgaagggtgagtgggaaagcaggagatgaccttgaaagggacagaaaatgtggggtagagggactcactggaatggatatggagtgaagggaaggtgttcccaaggtacgggaacatgtttgcgtgccaatgggaataatcctactgaaaggaaaagagaggcaaggtcttgagaacacacaagttgatgagatccagagcaaatagagattggatgtctgcaaggtggggggacacttcctctgtggtaagaggaatgaaaaagaaaatgggatgtatgtgtgggtaggtttatagatttagggtgcaaacatgagggaacttctatctaaagctttccattttctcctgaaatgtttaacaaggtcgttagctgaaacctcacaggtaataaggtccttatcctcccatatcttgtcagtcccttatgtttcttggttttttggttttttgagatgaagtctcgctctgttgcccaggctggagtgcagtggcgcgatcttggctcactgcaacctatgcctcccaggttcaagcaattctcctgtctcacttcccgagtagctgggactgcaggcgcatgccgccatgcccagctaattttttgtattttagtagagacggggtttcaccgtgttgcccaggctggtctcgaactcctgagctcagggaatccaccctcctcagcctcccaaagtgctaggattacaggcgtgagccaccgtgcccggcctgtcccttctgtttctgcttgtgtctgtaaatgctctgagaagagtctttcctaaactttagacggattctgtaactgccttaaaatccttcagtgcttccaaggcacagaaggcacgtcacgcttagggcccagctttctttcctagacccatttctcaacagttatctacctgtcttctggacaaagccagccacacagttgccctgaaacaatttgcccttgctgcttctcagcctacaagcatgctcttccaactggctggccctgtccttttttccctacctggtgaactcattcttcaagacccatttcaaataccacatccttttaaacctctttgattccgctaccccattccaagcatggtgagacactaagtcttttagtttgtccttttcaggaactgtagcttattcacctggatctaacacgatgtatgtggtaggcagtaagtgaatacatgaattttgatttctttacccatttctctagcaattctaatgaaattaaaatgaaatgaaagttatatactcttagtctttgatgcgaagaaaacgtttctttttctttgttctaggtggttctggaatggagccgagatcaataccatgttttgtttgattcctatagagacaatattgctggaaagtcctttcagaatcggtaagatctattttggagaaatctattatttggacctaaatcgtaagtcatgaaatagccatcctgtaaatatgacagtttaaggggtctttctgagttatagatatggtttaatttactcaggagtatgcccatctgatgtgttcactttagcagcacatatactaaaaaaaaggaaaaaaaaactggaacgatacagagaagattagtgtggcccctgtgcaagggtgacacaccaattcatgaagtattccgtaagatatttttttaaaataaggaaagaaaatatgtccatctgaagaaaagtgtgttcaccacattttgtgggtgaaaaatctgattcacagagagtaatcccaccttgtagtttattgggtaccttaaattgcatgattgcattttctgtctccccaggtctgtgaggtaaagggaatttcatccccctgtaggatgaggaaaccaggtggctactacacagcggtttctgagccctggccggaattctgttgacagcgtcctgtgaaatgggaccactccccagtaaaccactggggctgaaccccactccattggtcactcttgctgcttacctatgagggaggagcaaatagcctcatacctcattagtgtgggtctttcccttggaaggccaagcttcttagtgccgccattctggaacgcagtcttcaccatttcttgtctttggggattttttttttcctcttcacaagacagacctcagaatggaaacaatttttttcaacaccctccttccctttttgcagataaaatgaatcacacaagtcctttctggtttttgtttctgtcttctcactatttttttggtttattttagaaaatgtagtaatttcattataaaaggtgtttattttattttattttatttttatttttatttttttttggagacagagttgcactcttgcccaggctggagcgcagtggcacgatttcggctcactgcaacctctgcctcctggattcaagcgattctcctgcctcagcctcccaagtagctgggattacaggcatgcaccaccacgcacagctaatttttgtatttttagtagagacggaatttcgtcatgttgtccaggctggtctcaaactcctgacctcaggtgatccacccgcctcggccttccaaagtgctgaggttacaggcatgaatcaccgctctcggcctattctcattttaaaatgaattaagtatttttaaaatgtttcagttttattttcaaatatggcaaatgtggataattataaccttataaactaaagcactttggggtccatactaattttttaattttaagggaccaaacagtaaaagtttgaggaccattccttaatatagcagttctgaaactttagcttgcagtggagggcttaagaaaataacagttacttcccagcccagagtttctgcgtataggtttcagaggggttctgagaatttgcacttctaccaaacttcctggtaataccaaagttgctggtctggtgcccccactgtgaaaactactgcattaaaggatttttaatgaaatataattttcactttaacaagttaatttccctaaggaaagttctaaattgattaacattttaaaatcagatatttattgatttgtgccttatgctgtgccacgtgcagatggtgcacagatgcatagatccctgccccgaagaagcttcaaacgtttttaaaaatttttaaattgattttaaaaattaattaattatttatttttagagatgaggtcttactgtgttgcccaggctggtctcaaactcctggactcaagcaatcctcccatcttgacctcccaaagtgctgagattaaagggatgagtcaccatgcccagctgctttaaacttttagaaagaaaactagcttattagaaaatgcagattttgaggtcagcagttttaatcaaacactcttgttctctttctaaagaagtttagaaggttgcattaaaatatagtttgatttttatgtaggcatatattcaaaatttcctcattttgatgatgacaaataaatggatcatatataacatttcacatggtctaatatattttaagataccataacattgatatattttcattattttgctagtttctgtacagattttttatttttaaaatttatttattttaatagagatggggtcttgctgtattgcccaggctggtctcgaactcctgacttcaagcgatcctcttacctcagcctcccaaagtgttaagattacaggtgtgagccaccatacctggccagtataaatctttttaaggttgtttgctctgaatgaaaaaaatcccattccatatgtcagtaaaagtgaatatataaactattcactgctactaattgtgaggcattaagtcaatccgaggctcaattttgtcatctgtaaaatgtggatattagattaagagctattgtattagattaagactacaatctcttccaactctttggttctaaaatactattgaaggccaggcacggtggctcacgcctgtaatcctagcattttgggaggccaaggtgggcacatcacatgaggtcaggagttcaagaccagcctggccaacatagtgaaaccccgtctctaccaaaaatacaaaaattagccagggcggtggtggttgcctataatcccagctacttgggaggctgaggcagggagaattggttgaacctgggaggcataggttgcagtgagctgagatggcaccactgcactccagcctgggcgacagagcaagactctatctctaaataagtaaataaataaataaataaataagtaagacaaaatactatttaagttctctgttttctcacctactttatagaatgtagaaccaagggactgttaagtggctttaatattcacttaaactaaacagtgattaaaatgaaagttatgtcagtgtcattgctgctttggttctgagttatgagtgacttagtcttagttttcagctccaagataatgcattccttctcatctgtgaaccaagatagtggtctagtggttagaatgaaagattcagagtgtgaccatgtctaataggaaaacaactgactcattgacctcgtgcagatcacacagtctccttccatttgtcagttttgccaaagttaaattgatcatgtaatacatgcagtatattatgttttaatcagctaaataatataatataaatgatatattaaaaatatttagtagcaggaaatatttagttacaggaaagcttaagatgtaattctcctctcctttaaccttttcttttaaaaacacatcactgaagcagttttttaaaatttatttttagactgagcataaatcacctgggaggttgggaatgagatgaccttggataatttacatgtgggcagtgtgaggcagatggatttttttttaaatgagaaagactgatatatatgataaaggaatgaactaatagttaggcaataaatatgtattaaaccccacccatgtaggaggaactattctaggccctaggtatatagtggtgaacaaaatgaactcattggccttatatagaattggcattttagtggggaaaaaaagcgaagtgtgtaacctacatataaatcagtggttcccaaagtgcaatttctggaccagcaacatcagcattacctgagagcttgtgagaaaaggaaattctacaaacattagaatttatttattgataaattcagaaaaaccctagatagggaaacctttgcaaatcattacagtagggagagagagcccgaaggtgtaggaaagagaggaaataattaatgaagcagggcacagaatgcatgataacatttctgccctagagatactccatctagtggaagatagggctgcatggaaaatagcacagcacagtacaatcaggattccttacagttcaaagtagtgtggaagctgcatatgaagctatagattctctttgtgagaggtgagggaagggagggaattgaggaaggaggaggtggttaaaggaagcatgaaagaaagaatgttctaggcagaaggaaaagcatattcaaaggtacaaagtcctgcaagttcgtttcatctttggacaagggtatacaattggatcatccagaacataaggtgcagattatgaaagactttagaccttattctgcaggcagtggtgaaacttgacaagacatttggtaagtactcagctatcacatatgccagagaataaggtgattccttattttccagatgaagctctggaactctgttatctctttgaccttcatctcaactattctcttccatttcctctctcccctctgctcagggaactcgcctctgggtccttgaacaagcaagataggcgcctgcctcagggcatttgcctttggtgttccctttctctggcacattcttctctcagttacccacctggctggcttcctcacttccttcatatctttgctgaaatgtcaccttcttactgaggccatctctgatctccctatttaaaactgaccgccccgcctccccatagacactctttctatccccatttgctgctttactttctccacaacatttaacatcatctgactttatttatttgatttacttcctgtcttctcccttctggaatgtaagctccgtgaaggcacagatttgggctttgttttatttactgctgaaaccctagcacctagaacagtacctagcacatattaagcgctcaataagaattattcagtgaatggagaaactcatccagttatctcccctacttcttgtaagctaaaggttgtttcatttctgttaatttttttctttccataattcaaaagatttagctaccaaatagcatttattttcccacgagataatatggtagcaactgaaagtctaggctgtgcctgggctgtgaggaggacaaaaggagggtatgctttggtccttggcctaaaaataaaactgcaaaacccatacagtttcttggaaagtactaaacttgaaatagcactatctaaagaaaatttgcccaacctgtgggccgtatgtggccaaggacggctttgaatgcggcccaacacaaatttgtaaacttccttaaaacatgatgagattttttttttttttgcgtggtttattatttttttttttttggctcatcaactatctttagtgttagtgtattttatgtgtggcccaagacaattcttctcccactgtggcccagggaagccaaaagattggacactgctgatctaaagtagtatcagtacccagatgtacacatgaactcctgtgtcataagtcaaagtggcatgcatctgggcaggcccctgaaagatgggtaggtttttggtagtgagagaaaagggaagagtgcttttggcagggataaaatctgggtaaaatcactaaggtgaggcttaaacaacatactcaagaattaaaagcctgcctgactctttattatgaggacaagatgatcaggaagaaatggtgcaagttcaggaaggtcttctgtactagtgtctcatatgtcagcatatacttattggtcacctgtgtgccaggcactcttctcattgcacagatactttagagaacaaagcatgaaagttttctgctttcttggagcttacattctaggagagggccacacataattaacggaataggttacaagttaattatttaatatgttacaaaagtagtaagtgctgtgaaaaaaaaaaggaaaagcagaggtgaggctggggagggtgcaggcttgcgggggagcaaggcacaagaaggctacagcattaagtagggttaggtcttcattgtgggttttgataactttttttgtaatttgttcttttttttttttttttagagacaaggccttgatctgtctcccaggctggagtgcagtggtacgatcatagctcactgtagtcccacctcagccttttgagtagctgggactacagatgcacaccaccatacccagctaattttaaaaattttttgtagagacaggttctcactatgttgcccaggctggtctcaaactcctgggctcaagtgatcctcccaccttggcctcccaaagtgctgtggttataggcgtgagccactgtgcagagcctgtaattttgttctttaaacttctaatttattttctatgtttgacggcatttgcatcccagctcccttctttgctaaattatgagaacaggcagtttaatgtaaactgaacttccaagactactctacttcacccacgaacaatctttaaatctaatattagccttcttacagagtggctgtgtgcatcaggtgatgcaaattacctaagtgtctagcataatacaactcacagaggaggtacttgacaaatattagccccccagctacagtttgaaaacatgcagttctgtgataatatgtcatggttggattacttcttcagagatttttttcataatctctgggtttaaaccctgtgatattcttattaccaaatatattggaaaaatgcatttaagctggaggatttgttggtttgccctaggctttgtctgcccatgccgattgacgttgtttacacctgggtgaatggcacagatcttgaactactgaaggaactacagcaggtcagagaacagatggaggaggagcagaaagcaatgaggtaaaactgattttttttttcacatcagatgggtaatgtggcgatgtaataaggtctgagggtggcacatctcacatatgagcatgaaaacccagtcatcatgctaatgaactacaaaaggatctggtaaaactgatttttaaaaaacaaaacaggccaggcatggtggctcacacctgtaatcccagaactttgggaggtggaggtgggaggatcacttgaggccaggagttcaagaccagcctgggcaacatagtgagacttcatctctacaaaaaataaaaagtttgttgggcgtgatggtgcacgcctgcaatcccagctaattgggaggctaaggcgggagaatcatttgagctcaggaggttgaggctgcagtgagccgtgattgtatcactgccctccaacttgggtgacagagtgagaccctgtctcaaaaaagaaaaagaaaagagaacaaaacaaaacacatagtcctgtgggtacaagtaagcatgcattagagaagggtaagttgattttcacagtgccatccaaacaaacttgcccctcagttcatgccattacgagatcttggcagtcatccatctggcctgtgtttcttggtgcccaaggagaactcagccacttttgccagatactggcctcactttgttagatgatgattttatgaatatggtgctctagtaacggcttgctcttcaagggacctaaagacagaggaccccctcccccaacccgctggctgcctactcactcattttgagccccaggtgtggtatcttcttgaaataagtgtttattatgaaaaatatctccacagtaagacagattcttcccttgaaaaatataataggcccacagacttgtttccatttgaaaacggcagtaaaaagtatactccctttatgccttttaggaataaattacagactatggaattagaaactttggtactttttatttaatatatgagattggtcattttatttactttatctgggaaagttacagcggacttctggatagccataagaggtaggaacctggctgatgtaattcccctttgattcgttaggagtatttcttagtacctacttgttgacttctttgtgaatgtcaagagtgcaccccagtgcaggtctttggccaccttatattggagcaaattcattttctctttgttagaggttatatgactttcccagtgcatgaaaatggctgacagcctggtaccatgttttactaataaaatatgaaagtttatgctctaagcaaaccgtcttggttacagtgggaggtatagtagcccatatgtatgtaataaactgtatttgctttttattagagaaatccttgggaaaaacacaacggaacctactaagaagaggtaagcattttgatttcctctcaagagtaaaaagtgaaggattgaagtgaaatttcagattatcatttgtttttattgggtacacaggattttgtgtttattatccatatagtttttgaccccaaattaggtacatctattagacaggaaattttgcagtgctgagtgcatagttgactgagaattctggttattttgctaaccaaagcttcactgcactggggagggttagagtcccaagatttccttctctttagttccctcttggtgcattgttatcttggtccacttacactgtatcttctacccagtattttcatttataaaatttatgtccatcatttacttataggttcaatatatacatccttatctttaaaagctgtgaagctgtatattttatgtttaagaacctgggaaggagatttagcccaacaacaagaaccaaatacacctatctcgacttgagtcattcctgactctgataggtccttaaaacaagactgtctcactgacaagcaatctctgttaattgtcacctccccacttaaccatcagacttttaaaaacacttattgatagagaagatcctgagaatttcaagatccagaagtgcctttttttttttttttttgagacggagttttgctcttgttgtccaggctggagtgcagtggcgcgatctcggctcaccgcaacctccgcctcccaggttcaagcaattctcctgcctcagcctcccgagtagctaggattataggcatgcaccaccacgcctgactaattttgtatttttagtagagacggggtttctccatgttgatcaggctggtctcaaactcccgacctcaggtgatccgcccgcctcggcctcccaaagtactggattacaggcgtgagtcaccgcatccggcctcagaagtgccttctaagctatcttttatgttaattatatagctttatttataaattatattaacattaatactgttttttaaatggtttttaaattatttaaataaaagcaatggtgcaacatgaagaaagattgagaggaaagtgaaaagcaaaaactcacaaaattttataaatcttatttaacaactgttatttttattcccttttcatgcatatttgaatagttgtagtttataatctgtgggcagttttgtatcctttttaaactttatgtaattatatgtatgtatcatgttgatgcattatcttcatgcttcatatctttcagttttaatagttgtataatattccataaagtgactactgtaatttactaaatgttgggcatttctgtatttcactattgtcaatatttcatgatacttatatttaggtctgtggcattttctgtgtgtgggtttgtttttcctgttttgtttctcttccctacttggactggactagattcctaaaagtaagattactgaggacgaagcttatgtatgtttttatggttctgaataagtatatatgtatacatatgtgtattagacaagcatacatgtatatattaccaacttgctttcccaaaagatttggtgtcgtttggagtgacaccagcagtatttaagagaaggagatttactgcacttgtgctaatattgagtcatcattttttgaggggtgctaatttagtaaaggtgatagctcattgttttcttttacatgtctttattaaggaagttgaacaattttttatactgtttaactggttataggtcctactttgtgaattttctagccgtgtcctttgcccatccatttgtttattcaggtaatatgtttattgtagatatttcttataatcagatagaaatatctcatataaatttattttagaaccatgtcacagttgcttttgtttacatcagtgtagtgtcacatccaatgtatttagttgttttctaactggaattggtaacttgtatctggtaacatgacactctattaaccagaatctgcctccttcctaatctgtccaataatgggctttattggaattatgaataatctttaaaaaatgatagtaatgaagtgcttaatttcatgtgcattttggaattagtaaatattggtggggatcttattaatgggagtttgaaagctctatctttggagttgggtttaacaattttatatcatacttgctaacttaatttttgtatccatgagataaaagtcttcatttgttaaaatattatcattttttatgggctataaaaaaatctgaaaaatttagtagtatgacaagcttctcattgctgattaaatttcaagaatgtaattgtaagcatgttggtgtttctttccagtgagaagcagttagagtgtttgctaacacactgcattaaggtgccaatgcttgtcctggacccagccctgccagccaacatcaccctgaaggacctgccatctctttatccttcttttcattctgccagtgacattttcaatgttgcaaaaccaaaaaacccttctaccaatgtctcagttgttgtttttgacagtactaaggatggtaagatctttttatggatattttaaaatcatgttatcattggatgtttgaataacaaaattctgagtggaatagaaatgattcattcttaaatgtctgataaacttttctaaaaatgcacaaagagaagcaaaacagctgctattgtattttggccttaacctcaaaaagggattgctgcatatattttactctgtgtaatacacatacctttctgtgctgtgatgaggactttcaatctgatatcacaattaccttgttctcttggctctgaattattctagaggcaatttttctactatataactcctctactaggtagcgttctgcagtttgggcagaacatacctggagtattgattctttacattctgaaatatatgaactgaatgtgtttcctccaaaatttgtatgttgaaatcataacacccagcatgatggtattgggaggtggagcctttgatgggattagtacccttataaaagagatcccaggctgggcatagtggctcatgcctgtaatcctagcaattttgggagactaagaaggattgcttgagcctaaggagttcaagaccagcctgggcaacatagtgggaacctgtctctaccaaaaaacaacaacagcaaccaaaaaaacacacagctggacatggtggtatgtgcctgtagtcctagctacttgggaggctaaggcaggaggatcacttgagcccaggaattcaaggctgagcagtactccagcctggacagtagaacgaggccttgcctcaaaataataaataatagcaaaagagactccagagagctccctctgctctccaccatgtgacgttatgagaagatgccatctgcaacctagaagagtaccctcaccaaaacccaagcgtgctggcactctgatctcagactttggccaccagaactgtgaaaaacagatttctgttatttataagacaacagatgatttgggcagataatggaattaaaatggtaattcctggcataaaactgcacccacatccttagagatcccattctcccacttgaccagtgtactgctgagcccataacctgcgtcttctgctctagcctcttgtctgtctcattcctcctctgcatggattgtctctatttggaaggtccgtggtttttatgtgtaaaatgaaagctgccgtgttccctttccaacaccaagtctagttctctagctcccattctatcagtgtcatacctcccagcttaaatctttggaaccatctttgactccttactttttacatctataactaataattaacttcatcctatgacttgctttttttttttttccacatgattcttaggttcttaccttacttatttcctccacaccagactgaattccctcacacagactccaataatcggactcctgctctgtctatgtaaagtccatctcagtctgtctggcacacaggtctcacataaatctgaaaaccctgattttatgggttcactgcctttatgaaaagaataatatagcagttcatgtttgcttttcacatggatacaaacttctcttcctggtgtttgggattcagctctaattgccttgattttgtcagttgatccccacatccctgccctccctgcatcacattgcagctgtcagtgtcttcacacatgtggtgctaggccttgtgtcccactgcctgtccccttccccttccctctcagtacatcccctgcttcgtccagccccacttcaagtcctctctccttcatgaagctcctggactaatatattcacaatgattttatttttacttttctgtatttctgtaatacttataatctaactcatgactttaggttttgattgcacaggagtttatggtttttctcatggaatttttttattgaacagaaaacttaccactcaccagtttatatcctgatcagtgtctaacagtgctcgctccctgatacttaacaagttatttttagtttgaggttgggtgtggtggctcacgcctataatcccagcactttgggaggccaaggtgggcagattgcttgagctcaggagttcaaaaccagacttggtaacatggcaaaaccctgtctctacaaaaaaaaaaacaaaaattagtctggcatgatggcatgcacctgtaatcccagctacttgggaggctgagatggtaggatcgcttgagcctgggaggttgaggctgcagtgagctgagattgcaccactgatctccagcctgggcaagagtgagaccctgtctgaaaaaaaaaaaaaagttatttttagtatgaaaggaaatgttaacctttccaagtataaatgtctgccccttcactctatagatcctgaactgatttgtacctcagcactcacatattcgaactgcagcctggagctgggtctactcagcaaagtagtttttccagtcaagcttatactttttgatttatagcaaacaaatttcctccagtggcaattcattttacctctagactaaactgacttttaaaaggaaccacaaactgcttccttataactttctcacgtaggttaaagctgtgcctcctatggtcacacagaactcacgtaatccctctcccttgggacattttattttcctttctttggctgtctctcagggacttgtcagtgtcccagtttgctcttctcagattacttttaaaatgtgtcaatgggaagtgaacattctattttagtgtggttctgtcttggcagggagagcaggactgtctgtttaatgagtgcttattaagtgcctgctgtgtgccaggtactgttccctgtactgaagatacagcagggaacagatgggcaaaaatctctacccttaccttgtgtttacatcttggtggagggagtcagagagtcagacggtaaacacgataaataagtagattacatagtttatagaagataatgctttagaaaaaaaccaagcaggggcagcagcagaggaagtgtcggccagggcagggggttgcaattctaatttggatggtagggacattgctcactcagaaggtgacttttgagtggaaatgtgaagaaggtgaggtagccagcaatgcgaatatctggggaaagactgatctgggtaagtagaatagccattgcaaaggccctgaggcaggagtgtatctggcatgtttgaagaaaagccaggaggctagtgtggctggaatggagtgaacaagacagaggcaggcagtagatgaacctgaagaagtaagcaggggaccaaatagtgtaggccctagtaaccataacaaggacctggctttaacttggagtaggatgaggaatcaccagagggttttgagtagaaatgtaatgtgatctgacttacattccaggcagtcaatctggcttctttggtggaaatagactgaggaggggcaaaagttgtgataattcagacaagagggaaggttgcttagaccagggaggtgcagtgaagataagaagtggttggattctggacattttgaaggtcaacccaacagggtttcctaatgactcggtgttagagaacatcatcaccttttttattcgacgtactttacttctgtttaaaagcacaaaaatgtgatggaaattcagtgtggccacagcacattgttgactcatactgaactcactgttgagtaaaacttatctttttaaaaaaaaaacttatatattctaatgctcaaatacctattttagtgtatgcttgtgtagttggttttggtaccatatataaaggttttacttcataggagattttattttgccagatttgactcattgctccaaatagtcacaaatttgggaaatccatagtctcttatccaggacaatagcttctctgccatcttcctatgaatctacacatttcacaagcatgccttctgtaacttccaaaacattgatagagggttcagcaagaccggacctatgactaatctcctaaacctccctctaggttgattgcggctttgttacctacacctctttggtagaattggttaagttctagcccacctgagcatcgagcctgtatgtctttgttatatccatgaagatgacatgagatgcccttagctactttgctgagattacaaatacatataccaggtctgttaggtagaattcatcatatcaatggaaagagagagagaaaagtttatctgataaagttgtaatgaattcatactcttaacagccagtgcttcctttaaagataaacagtgtattatgaaggctttcttttctcagtgctcaccaactatattgttttttttcagtttttgagaccaggcctcactctgtcacccaggctagagtgcagtggcatgatcatggctcaccacagccccaactccggggctcagatgatcctcccatctcagcctcctgagtagctgggactataggtgcacaccaccacactcggctagtttttgtgttttttgtttgtttgtttgttttttgtagagacagggttttgccatgttgcccaggctgatatagaacttctgggctcaagtgatactcctgcctcagcctcccaaagtgctgggattacaggcatgagctactgtgccctgtaactatagtacacttgagactcatgcccaggattgacatctcatctcatcaggctataatttggagaacctgccttctttgtttatcttgaagatcagaattggagctttctgacctctcttttgttttccacaatccctgaatgtcagcagtgagtttgttgatctcacttgtccccatcactaactctctcccagttgggctgtgtcacccccaatccctactgtgacttatgatgctccattcagcagcacccaatgaactggggattcattatgagaaaactgtgcctcttaaggaaccacaagatccatagtagccccctgctgttaacatacatgccactgcctggtgttcaagggcccctttggttacccttgtttcctagtactcaccactcccaaatattttactctagtcaaacaattctttctttttccccctgtctttgcatatacatctgtgatttctatcatcctatcatttctgtcttcgcattctagcttaaatttgactgctcccatgaagaattccctttatgtcaatcacctttggtattgtgaaatttaacatttcaacgtacactgatttacattgttccccttttgttgaatgggctaattttgtctccttcagcttcctttttttggaccatatattatgctgctttaatagctctcagaatgttttcacagtgttctgccagacaccatagttgagtattcattaaaaatgtgcttgtttattgtattcttggttgtagttgaagatgcccactctggactgcttaaaggaaatagcagacagacagtatggaggggctacttggtatgttattttaaatttaattgcatttttacaatagactagaataaaaatatgaataataaagctgtttttctttgagaatctttttaatgtttattttttatctaagggtagcttactaatattaatgactgttgattcaagtaatcctaaaaatcatattttgaagcttgtgttgtgatgcaatagatctttaccagttttctcagctgtaggttttcaccagcctcatgatgtggaaaatgagttatgtttttccccttattttagacaacagataaagaagtccctggattagtgctaatgcaagatttggctttcctgagtggatttccaccaacattcaaggaaacaaatcaactaaaaacaaaattgccagaaaatctttcctctaaagtcaaactggtaagaacatagaaaatagagcaattagcctggcacattctcatttaatgtgtgattcttttcttgtggtccatttttttcccccaaagtttagctgataaacataagaagcaaagagggattctgttctgccagaagagcctcactccttacttttaatttgggcaaaaatctaagagtcttatttggtttgcttgtttcctggatagagaaggactcatttgtttaacagatgagctcctacaatgtctcccatccaagtagtaaccaggcccaaccctgcttagcttccgagatcagacaagatcgggtgcgttcagggtggtatggccgtagacgagctcctacaatgtcttaggtgacattacagctgctggggatgcagcagtggacaaaacagacaaaggcccggatggaacttagggtgtgaacaatggaagcatgggaggaggagatgaggggaagtcataaatgtcatcaatgcacacagcctgttgtttacccaaagctttcactcataaaggtagtgtgcttcagatacatggaacatctgctaatgagaaccattcattagtaactaattgagggacaaatgtatttaaaatttatacttattagctcttcaggcttgaccattgatgccacttgttaaggtggactctggaggctggcctgggacgtgccttttccttaacatgtattgttttcagatcctttatctgattgacttaggacatagtccatgtgggtgttctctctatttgaccttacgtcaagatgcctgctattctgtcagaggtgtttcaggttgtaaatcgtgaatgtcccatctcttagagtagagagcataaagtccttgtctcagaatttgtgaggctctagttttcctgattttataaagaaatgttctttgagttctgccactgggtttagcttacctgattcttacttcctcctgttgtatgtcatttaacaattttgagggtgaaaggatgaagatggagtagtggtgggggagctgtgattagaggtgactagagagcagtttttacttagttcctgtcttaaccatgtttttatatgcaccccccaaccaaattccttttaacttgtttctccctaccccagaccaagtgttttactgttttatgatacattgtattatccttgtaatacaatggtaatgtgaataaccacttatgaattttttacttttttcatatttttcttcatagctttttttttttggagagagtcttgctctgtcacccaggctggagtgcagtggtgcgatctgggcacactgcaacctctgcctcccgggttcaaatgattctcctgcctcagcctccaaatagctgggattacaggcatgcgccaccatgcctggctaatttttgtattttaagtagagagggggtttcgccgtgttgaccaggctggtctccaactcctgacctcaggtgatcccctcaccttggcctcccaaagtgctgggattacaggcgtgagccactgctccttgcccttcatgactttctttattgtactttgaaatactgtaatgcctggctatattagagttgaatttgttcttaaatgcagttattttagaatagataatacatctctccttcctctgagttatttttagtactgatttggacagataaaaccatagattaactttcatttcagccaatgtttatttgacttcttggcttcctggttattagttctagaattatagacacatgtatatctgtacttttgaccaccagttcaacttgcttatgtagacagaatggcattcttgattctatttatataatttcaataaaataaatgctgaaaagaaagaaggttcattccacttctccatactccactctgtttgaatatcccacatcacttggcctgctgcagctgcccaccagtgcggactgctctcatgcgtctactggtggatgggtgtgtgctgccagagaatgccagtcccgagtcatggttgacaattcagcaaactatttttgggtggcatgtgtggtataagcaggtcgaggtggagtggggtagcaatttgaattgaacaaggaaaaccagcaggctccaggtgtggtgagactcctttccacagttcagtctcccagtcagagatttatttggattttcagagttgtctttgtggaggccaacacctctcagagcatcaagctaatcacacataatgttctttgaaggttgttttcataattccaacacctgtgatcaacttcagggactaggacttaagatttttagagactagagagaaaatgagaaagaggaagaacagacgcagtgtcagcatttgagtccaggcctcgagtgacttgctttccttaggctttgcttcctgattacattatgagtactctgagaatgaagtttcctatcactgcgttcccaaccaaacaaaacaccttttgtgtgtatgatgagctccaaataagagtttatacagagtgccatgagaacatctgggctttaggtgtacttggggtcaaggcaggctttgcataatagaagcattttagctgggccctaaacagagcagccattctcccagcagagaagggagcagaagagaccattctatgtagagggaacagcctgagcaagagggctggaggcctgaacataaatggtgttttcagggaaccaaggcaatggtttctagcacaggcagggattttggtgaggatgagattgtaaagacaggttgaggccaggttgagaaacgtctctgttaagaatactagattttttcctgtaggccgtggaaggacacagtctgatctgcttctaaggaacatactagggaaaggtgtggtaggaaaaccagttcagctgctgctgccatagcccagtaagacgttcccatgcaaaagttgcttggcagtgggatgccaacgatggaaatggttccagaagcatctgagagaaacactcaacatcacttggtgacttacaagctattcaggaggaggaagaggagaatgaaaggggaggtggacctttctggtgaagatagaagtgatggaattaaccacactcagagcttcagtggcagaagcaagtgtcttttggaaggagacccagagctcagtttcggatgtgttgcattaggggtgtacgtcgcatgtcagaggagagggctgttagacattggacttcaagacttgaactgttgaaccactttgccctcgcaggttcccccaggaggcctttgccatggcctgtggccctggagccacctagggctcagctcagctctgccctacagattctcactaggccacgggtatctcaggacaggtactgccctattcacctttttacccttagtgattacttggcacttagggggctgcttaaggaatgagccatatgaggcaatatcttgggatatatagggaaacattttcagcagtatgattattcacaggagtcactctaggcacagaaatgtgtctttgcacattgttgtatatacacaactaggcctttgtcatcctgtttagaacaaaacctgaagttttttgtttttgttttattaactgaggcaggagtgtaggacttgaaaatagtttcatttgtaagataatggatttgaattcataaaatcttttgactgtagtcttataaatcagtcttttctgtaagagactttctaatttgaaataccttgaggtgggtcctttaataatctgattaattactctctaatttatctgtataatttttgtgtatgacggacacagaattcagcttttgataaatcagatcatcagtccttattttcagatccctctaaatcattttgtatccatagaacattttcattcatggtgggtttttgcatttattttttgatttttgcttttgttcacttcttttttaaacatattttagagcaagtgggaaatcttcccaaagctgtcaagtgaattctcatgctaagtttccttcaattatagtagttgttgagtgagtgtgcaaaacgtggaggagatgtagaccctgccctcaagcatttatagtcacattttggaagcagcgtgtgtgtatagagttggcagttggaaacaggaaaagtctgtgtgggtcagagacatgggggaagttttcaaagagaaagaggctgcactgggttcttgaagactgaacaggtggtttgtgcaggcaggatgggaacagcatattgtcctgcatggactctgcccccctcaaagctctggtcagggcctaaggtcacagtaaattgtcataattttctactaatgccctttcttttagataattctctgaaaccactatgtgcacttgttcttttaaagcacggtacctttttctttttttgttttatttctaaaataaagatgaaacaaccaactctgaaactgattaagttttagaaaaccaccaggacgtattaagatctagtagcggccgggcatagtggctcacgcctgtaatcccagcactttgagaggccgaggcgggcagatcatgaggtcaggagattgagaccatcctggccaacatggtgaaatgaaactccatctctactaaaaatacaaaaattagctggatgtggtggcgtgtgcctgtaatcccagctactcgggaggctaaggcacgagaatcacttgaacccagcaggcagaggttgcagcaagccgagatggtgctactgcactccagcctggcgacagagtgagactccgtctcaaaaaaaaaaaaagaaaaaaaagatctaatagctttgaattgttgaatcacttaaaggcactaatttggttttcagttggtcttagcagacgtggggtttttttcctaacagatttttaatgattttaaatcaaatgaatccaaaatgaaagtagattacaccttctgaatttgtaagcactttaaagttgttgggaaaataacttctaataggaaagccttgttattttggatttgcatgttcttctagaccaaattttctccacctttgcaccattcacagtttagacctgttgccgctatccttgggggactgtcctatgtattgtaggatgtttagcagcatcccaggtctctgtccttcgggagtatttgcagatatgtgattgtttagacaacttgacgcagcctttctttttggcattgaaaaatgaccagtttgatatcatgatttttaactaaggcttatcttaaaatactattttgtctgcctcaaaaggataccttctcttttgcactcattatttttgcttgacttaaaaacatgcattcaaacttacctgtatttgttggctactattgtttttaaagccaatttttaaatataggctacaatgctgagaacagtagaacgaactgttgaatattctcacttataataagcaatatcttaaagtggctctatgtattttatattaatatgctctaatcttgccttgataatcatttatagaatttaaaagtgaagattatttacactgctttttcaattcttatatcttgtgacttggtcagttatactgaattatactgaatttaatactcctgggattgttttatcatccctgtcctatgtgatacactgtacaaaatgtaaaatgttagatttgcttccaatatatacttacatatgttcatattatatctagaagtttgtgaagtatcaagcacttgaaatctggtttccatatctgtcatgccattgaaattggtctccattgacctactaattacacattccacttaattttgtttcttgtcccttaattttgatgcttgttgtctttagaaatataccagaattaacatatttttctgaattaacatttttttcttgggttctacaacactgcttctcctgaccatcatctatattgtctttccttgactcaaattgatccaccagttgctcagtcgttgtagcctacccaggccctggcctcagccaccatttagttctccctctgtctgtcttcccttgcctcatactcctacaagtaccaggtgtatcagtcatgttgttctagatgatgctgctagaacaaacattctggaatctcaatggctaaaaacaacaaagctttatttcttagtcatgctacgtgttgttcactgtgggtctgtagggagtgggtatagaagttgttcccttttgcagaaacttataatttatgtaaatttaaaatttaaaataagatgccatatatggaggcagttgcccacaattgcccaagccacaaactccagccttaggcacaaactacagctgctcttcccacactaccttctctcttctgacaaaagtaatgatgatgtccaggattggggtgccacctagtggctgtcagagggtacttccccaccctttttacagtggcagaaaatctttctcatacatataaatattaccttaacctcattaatcttcatctctttccgaattattgtatagttactatagacaaacctcttcttgctcttttatgcatatataattagaaaccaaccctaggcactaaaaagaatagttttagtgatataccttcttatcaaacaaagagccaacacaagttatgaaattaaactagacacaccccttcttcgaggttacgccaagccagtgcctgggcctgaaactggcctgcagcccctcagcttcgcccactgccttccgaccctggaccttcgcaaagtgaacgagcttcgggacttcgtgaaaatgtataagcaggatccgagcattctgcataccaaggaaatgtgctttctgagggagcaggtggagagcatggggggtgaagtaccatgtgctactcagaaagctattataaatcagaagaaaatatcaaggaattaaaaacaggtagtaagaaggtggaggaaaacataagcacagacgaactatcaagtgaggaaagtgatctagaaattgataacgaagctgtgattgaaccagacactgattcccctcaagaaatgggagatggaggtcaggcctggtggcttacgcctgtaatcccagcactttgggaggccgaggcgggcagattgtatgtcaggagaccagcctggccaatgtgatgaaatcctgcctctactaaaaatacaaaaaatattagctgggcatggtggtgcttgcctgtaatcccagctactcgggagtctgaggcaggagaatcacttgaacccgggagatggaggttgcagtgagccgagatcacatcactgcactccagcctgcacgacagagtcagactccgtctcaaaaaatagaaataaaaataagtaaataaattgttctagaatagtgactttttctctccagggagccctcagaaatgctttgggggtgctgtgagagggaggaaagggacaggaaaggccagagggtagacagggacccaggcagactactaatccccctgtgtggcctgcctcccagcacccggcacatatgctgaggcaagttggtgactcagtgagaaccaacttagtgagtactaaatatgtgccaggcactcactaagtaaaagaggtgaaagtggtgagtcaggaagacagttacatgcatctgcaggtgctcacacatgcacctgcacctaatctgtgagaagagttaatggcctacatcataaggggaaaagatataaatgaaatttctaactctcacctctggtgttctggactacatacgctcaggaaactgcttagaaaatgagctaagaatagtcatgcagcaaatagaagagctcagaataagctcataataaaatttgtgtttgctttgttttatagattgagaaagaagaccgtaagctcttttagaagcactagttcagcagaaggattttactgtcctacatttgtggttttcaggcctctccccttttcctgagtgatgaaagcctcttcataggaagttgtgtgatacagagtcagaacagaaaacagataaagagtggtgtggactttcgtaggggtggcaaagcctgtttgtggaacttgatgtttgtgatgttcacgcttagatttatgattgccccaaaagctttgccccaaaaggtagttttcccatggaagcacttcaggcagtcctgccgaaggtgctcctcccaggcacgtggcacaaaagctgttcagacaccccactagcagatgtacttgtcaccaattccagcaaggttaattacattgcagattttttgcccaatataagcagattggtaatattctagaagaaaagtcacagaactgttggccagcaggtgtacttgcaaagaagtcaaaaatcatttgagccaacattgaaaaattggggagatttcatacaacagttggggattcttgcctctcaggagatctggcagcacttggtgccattgagtggttgcagctctcagatggctctgaggtgtccagtttgccactgcctttaccattccttcttgtttttagacgcctatttttttaacattcatttgggaaatgcatctggtctgtgtaggtctttttgttgtgttttgatattgtcttaccatttcaagattaaagatcaggccagttgcagtggctcacgcctgtaatcccagcactttgggaggccaaggcaggtggatcacctgaggtcaggagttggagaccagcgtggccaacatggtgaaaccctgtctctactaaaagtacaaaagtttgccgggcgtgatgatgcagtcctgtagtcccagctactcaggaggctgaggcaggagaatcgcttgaacccgggaggcggaggttgaggtgagcagagatcgtgccactgcgctccagcctggcgacagagcgagactgtgtctcaaaaaaaaaaaaaaaaggaaagattaaagagcagagtgggaatttaaaggtgcttcatccttgagattcagtcttttcatgtgtaatcctcttgttatttgatagttgcagttgtattcagaggccagtgtagcgcttctaaaactgaataaccccaaggattttcaagaattgaataagcaaactaagaagaacatgaccattgatggaaaagaactgaccataagtcctgcatatttattatgggatctgagcgccatcagccaggtaagggatgcacagaagcttttacagcccaaatcaaaggttaagatgttaaaaatgtgtaagttactatattagaagagggaaggggacttacagagaggtgagttgattggaatttttctaatttttcagtcactgccattggtttggtattaactgaagtcacctagaatcagatccaagaaccttcttcataaagtgtgttatagaaatgctgtctctttgaattttgggtttaaaaatatatatactgaatcttttgcattttttgtaatgtttaaaattaggactccatctttaaaagtctgccagagcaccttgagagcagacgggcagaaggaaaggacaaagaggaggaggtatgacttaaggggtatttcacatcttcatatgccaagtgtttttctcagtctaagcaggatgaagacatctctgccagtcgttttgaagataacgaagaactgaggtactcattgcgatctatcgagaggcatgcaccatgggttcggaatattttcattgtcaccaacgggcagattccatcctggctgaaccttgacaatcctcgagtgacaatagtaacacaccaggtacaggactttctaaaaattacaagactgtgatttctaattctgctcttttagtgtggtacagggatttccataatttcattccctttacccttctacctccatttcttcctttctctagctcttcattgccttcccttccttcctttcaaaaactaaaccaaacccaaacagctctcattcactctctttttttgtttgttgttgttaaaaggatgtttttcgaaatttgagccacttgcctacctttagttcacctgctattgaaagtcacattcatcgcatcgaagggctgtcccagaagtttatttacctaaatgatgatgtcatgtttgggaaggatgtctggccagatgatttttacagtcactccaaaggccagaaggtgagtgcctaagaggaggggggttgtctagcgtggaagtcacttagcaaatcagaaaatgagtgcacatactactgtagtcaaatatcaggccagacatggtggctcacacctgtaatcccagtactttgggaggcggaggtgggtggatcacttgaccacctaggggtttgagaccagcttgggaagcatagtgagacccctgtctttacaaaaagtaaaataattatctgggcccggtggaatactcatgtagtcccagctgcttgggtgttggggggccgtggggggagtagggggtcactggccaagatgggaagattgctttagcctgaatgttgaggctgcagtgagctgtgattgtgccactgcaccccagcttgggtgacagagtgagaaccggatcttgaaaaataaaaaaatatatatagatatatgagatcaaataatcatttttgagtgctaagctcagaaatcagcaattaagaagtaagaacactacagttagaaatttgctttcctgcattcttagacacccaggacccacactttttcccaaccatctcaattttctactacgatagcagaaaaagcaaaatcactgtgaaacagacaatcatggttagaatatcagcaaaatggccaaaatagaaagttaactcaagttagtgcttaaagctatagatgtaatttcatttaaggtagcctgttgcactctaactttgtgagaggtgggatggagaagtggttaagagtacagacttaggggccaactcttcaggatgaccttgggcagtggctctacctctgtgttttctggcatagtgaggaaagtacaaatacccttgtagcgttgttagaagggttcagtgataagttagagacttatcaccgtaaacttagaagttataaaactctgcaactgtaagtgctaataacacaaaactactttgtctgtaattgtttatgctacccaaccaggcccattctcctgttcccctattgagttgtctcctctgtatcagactgtagggctcaaagttgagcttgtggcttaacaaggggacaaacaagatcaatgactgtgtggtgcttttcctgctgacaggtgtgccttggtgctgaggagtgtgagcaaaggaggcttaaatcagataggatagggaagaaagcccatctgaattgacatgtactgagaagaacaagtaagaattagtttaggttaaaaaagacattccaattagaatatgcaaaggcacagagatttttaaagaggagtgtattttttttcaatgattttaaatttgaaaaaccatgtaccccatcactaattctgagagcaggtgaatgcacagctcagaatgctatgccagttaatttatcacagggccttaagcttgaagagagaggatattgtctctcagccttgagacaagattatgcacaaatacactaatgagctactgatagttacagaaaagcagtgactgtgcatacttcccaccagctttgacatgctttggtacttgcagtcaagtctggcatggtgctactttatttcatagtagattatcaaagcatgttatgagagactaatccatgagttgaatccttgtctgctttccttgagtaatggaaaaaaagtaaatacgctcagtaagaacggtcaacgcagcaggatctaaacaatgactgtaggtacaggcaaacttaaagcacttgtgagtgtgaacgctgagccctttgaaaattttaatctttctagagacttaatttctttttataaagggaatcttaactcaagaataaaatgtatcagaagccagaagtcattttattttctctttggttttatcgtaggtttatttgacatggcctgtgccaaactgtgccgagggctgcccaggttcctggattaaggatggctattgtgacaaggcttgtaataattcagcctgcgattgggatggtggggattgctctggtaaggatgtgttaaactgtaattcgttcatttttatggaatattttcttcttaatcattattgaacatgtgctatagacttaaccaaacattctttatgtattaataaagaatcagtaatgctgggcatggtggctcatgcttataatccagtgctttgcaaagctgagctgggaggagtgcttgaggccaggagttcaagaccagcttgggcaacatagtaagaccccatctctatcaaaaaaaattagccaagtgtggtggtgcaaacctgtagtcctagctacttgggaggctaaggcaagaggatcatttgagcctaggagttagaggctgctgtgagctgtgattgcaccattgtactctaacctgggcggcagagtgacagcctctctcaaaacaaacaaatcagtaatcaatggactctttggaggtggtaattagtgccctcatgtggcccagtttattcattgttgagggcattgaacaagagaaaatacacttgaaaatgtcttcttatttaaaatatgaaaatctggaatacacttatataaatccaagagcaagaatcactctaactggttcttataggagctcactgctggtagctttcagcagcagattgtgataggtcacagaattactaaagagttgcaaaagaaataagtattttctctcctcagcagctcttccctctccctcacatagttatattttgacttgttgataatagcaatttgttacatttacttactacctttcaatttataaagcattaaatttatagagcattattcattatattcacttgaattgtgtttgttacctgagagagagagagagtaagtatgtacacaaatgttatcatccccatttccatatgaagaaatggatttggaaatgtttgaatattggagaaaacaaagcttcaagttgtatttcagtcagatatgtcagatgcgctttagctgaggagagagaatacagatgtgcaaagtagatctgtgtagaccagagaagtcagtctctactggaacattagcatttgataacaaggggtatcaaacatgttacccacgtttggacatgtttttggcagttctgatagtcacagtctttggaataatctcttcttgttttcgtgctcctccatttctgtcagcacgtgccccttgagcaaatgtaagccctgtacttgtaggttgcacagctacaaaatgccagggcctgttcatcacgcttctgtcaagtgactcccttttacgtttattttcttcttaaggtatatgagatcttctactaaagaatgaggtgaaccttttctgactaaaacttacacatcaaccttgaaaacatcaatatgaaataaggaactgtctttttcgttttttgttttttgagacggagtttcactcttgttgcccaggctggagtgcagtggtgtaatcttggctcagtgcaacctccgcctcccgggttcaagcaattctcctgcctcagcctcccaagtagttgggattacaggcgcccaccaccacgcccagctaatttttgtgtttttagcagagatggggttttaccatgttggccaggctggtctcaaactcctgacctcaggtgatccagcctcctctgcctcccaaagtgttgagattacaggcgtcagccaccacacccagtccagaactgtctttcaaaattgtaattacagcaagaatccctcttcttcctccgatctacaggaaacagtggagggagtcgctatattgcaggaggtggaggtactgggagtattggagttggacagccctggcagtttggtggaggaataaacagtgtctcttactgtaatcagggatgtgcgaattcctggctcgctgataagttctgtgaccaagcatgcaatgtcttgtcctgtgggtttgatgctggcgactgtgggcaaggtatgtttactgccaaacaaataagaatgggagcataaaacatccttgacaggtagagagagttttgaatggcttttgttatttaaaataatgattctctgtgtatccctttaccagccttgcattcaaactagttatgaaagtaagagaacaacataaatcactgaagaggatcttttcctgttattgttgcagtctggtgttttgttttgttttgttttgtttggaccaagcagatttaccttagctgaaaatatgtggtgaagttttaatttggaaacaaaaaaggatatcaataattcattaaataaagatggttcaaacactggattttgttgatagcgtattaatggagtttgttttggcagaaagtttttttcaaatggataaaaagatggaaattgattattgtaatttattgttaagaaccatgccatatctctatagtgagtcaggatcactatttcatggtaattattgtgactgcctcagatagtgaaataagccctataccagtaactgttgtattaggatatctgattattttgaaattaaagtcactcttagaaagtgaaaactcagtgcctacttcagcagcacatatactaaaattagaacagtttaggcattagcatggcccctgcacaaggacgacatgcaaattcatgatgcattccctattattttttttaaaagaaagtgaaaactcagactcaaagaattaaaggaaaacagaggaaaaatgcccagttaaaaaaaaaatcatgtttctgttttttcctctagatcattttcatgaattgtataaagtgatccttctcccaaaccagactcactatattattccaaaaggtgaatgcctgccttatttcagctttgcagaagtagccaaaagaggagttgaaggtgcctatagtgacaatccaataattcgacatgcttctattgccaacaagtggaaaaccatccacctcataatgcacagtggaatgaatgccaccacaatacattttaatctcacgtttcaaaatacaaacgatgaagagttcaaaatgcagataacagtggaggtggacacaagggagggaccaaaactgaattctacagcccagaagggttacgaaaatttagttagtcccataacacttcttccagaggcggaaatcctttttgaggatattcccaaagaaaaacgcttcccgaagtttaagagacatgatgttaactcaacaaggagagcccaggaagaggtgaaaattcccctggtaaatatttcactccttccaaaagacgcccagttgagtctcaataccttggatttgcaactggaacatggagacatcactttgaaaggatacaatttgtccaagtcagccttgctgagatcatttctgatgaactcacagcatgctaaaataaaaaatcaagctataataacagatgaaacaaatgacagtttggtggctccacaggaaaaacaggttcataaaagcatcttgccaaacagcttaggagtgtctgaaagattgcagaggttgacttttcctgcagtgagtgtaaaagtgaatggtcatgaccagggtcagaatccacccctggacttggagaccacagcaagatttagagtggaaactcacacccaaaaaaccataggcggaaatgtgacaaaagaaaagcccccatctctgattgttccactggaaagccagatgacaaaagaaaagaaaatcacagggaaagaaaaagagaacagtagaatggaggaaaatgctgaaaatcacataggcgttactgaagtgttacttggaagaaagctgcagcattacacagatagttacttgggctttttgccatgggagaaaaaaaagtatttccaagatcttctcgacgtaagtaacatccagcctcattctttctcatgctcaggaagagtaaataatctcatgataatatcattatagctaccatttattcagcacttccctgtgccggccatggaactaaatgcttttcttacatggtttcatttaatttacccaataaccctaataataaaaaatgtcatatgaaggtatttattattgctgtccccattttgtagtttaggaaacagcccaagtgtgaatgagtaagggatttagccaggggcgtacttggaggaaggagagtgggaagtggcatgttgtcttgtcttgacatttcagatatggtatttttccagctttactgatgaaaaaccctgaagttcaattaagttcattcgcttccccaacattataacagcaaatcagtgtgagccaagcctcaaagttggactgctcgttgccctgtaccatggcttcactgtgctgtggtgtcatctgtacctctcctcagtgctctcacggtgctaaccactggggaatgcaagatgacgggaacatagccactgctcatgtggaaactcagggaccagtagagaagacaaatttgtggggagaaaactgtagcaaagagatgtgtctgtgttgagatatgggcaagaagttcagagggaggactccttagctctgcctagaagtactagggaaggcatacagaaggaagtgccctgtggactgaccttcgaaggggtgggagttgacagaccaaaaaaaaaaatcatacagtctgggctgaatagtgaaggcacacagccacgagtgggtgttaggctgggagaaaagagagtgaaggaggaactatgtcctcagcattttaggaagtatcttgtgccttgcacatgaggcatttacagattgtctagtgaaggactgcagtgttcttgactatgtttatttcctcagtttcccccattttctttcctttcctttcttttttttttttttttgagatggagtttcgctctttttcccaagctggagtgcaatggcgtgatctcggctcactgcagtctttgcctcccaggttcaagagattctcctgtctcagcctcctgagtggctgggattacaggcatgtgccagcatgcctggccaattttttgtatttttagtggagacggggtttcaccatgttagccaggctggtctcgaactcctgacttaaggtgatccgcccgcctcggcctcccaaagtgctgggattacaggcgtgagccactgtgcctggcctctggcctctttcctttttttttttttttttttttaaatttacaaaagcattataggctagtagtaaaaattgcaaacaattcaaaaatatacagtaaataaaggaaagttcttccttcttcagtctccttcccggagataattgctgttaatagtttgatgggtattcttccagtatttttctatagctatgcaaacatacctatatgtatgtatagttatatatagagaaatatatgtatagtgtaaatttacatatatttccctgcagttgccttttgatgtagtaggatgtgggcaaatgccattatttatttatttatttatacccatgccagtgccattattctttttaatggctgcaggttagttatttccaatgttttgtgattacaaatagtgttgcagtgaattctcttgtacatatatcttacatttcagtgagttttagttctgcaggtagaattactagcttagcaggtataaactttaaatatgtctttctgaaatgttgcaccacttcatatttccacaaacagtatacaacagtgcttgtttcactgcagtctaaccaacaccagttaatatcagtctccttacatttttatttttatcagtttgagaagcaaaaatatttctgtaaagtgtttgaatgctttgccaattttctttgcctatttagttctgccactgactggttttgattttataatattaaaactattataagatgaaaccaaatttgtttctagtccttgcgcttaaaactcaaggacttgcacatttgatatcacctgcagaaatagcttgatattgaaagtactatcaaatgtatatgtacataaattttctaaatgttgcattgaattagctttgacatctcacagtcagtgaccagtccttgaagaataccctccatatgtgactgttgttatgtagatctccatcgtacagctgttgttctcaaaccaacattggtgatacttgcactgaaatccagttgagtcctgctaagtccagtttagatccttaaagtgacccgttaacatgtatttcatttgctcctaatgaagagttcgtgactagttattaccacattatataaaatgtcttgtaacaaagtacacttgtgcactaaacataatgctgagttacatgtagaattctcttttcaggaagaagagtcattgaagacacaattggcatacttcactgatagcaaaaatactgggaggcaactaaaagatacatttgcagattccctcagatatgtaaataaaattctaaatagcaagtttggattcacatcgcggaaagtccctgctcacatgcctcacatgattgaccggattgttatgcaagaactgcaagatatgtaagtcttgctcgtgtttgagttgtttgcttgtgttcagaactaaggctacttgaaatgtgcatatttaccatgctaaatttatagctctaatatttgatgactaatatgttaaaggtattatctaagtgagaaagaaaaaagtccatctctgcaaatgttagatacggtacatactttgaatatccagagtttgtaatatgttatatttggacaggttccctgaagaatttgacaagacgtcatttcacaaagtgcgccattctgaggatatgcagtttgccttctcttatttttattatctcatgagtgcagtgcagccactgaatatatctcaagtctttgatgaagttgatacagatcaatctggtgtcttgtctgacagagaaatccgaacactggctaccagaattcacgaactgccgttaagtttgcaggtgttgtattgtcttattctaaactttttgatgttttaaatgagaatttaattctggtcaggcgcagtggctcacacctgtaatcccagcactttgggatgctgaggcagctgagctcaggagttcgagaccaacctgggcaacacggtgaaaccccgtctctactaaaaatacaaaaaattagccggatgtggtggcatgcgcctgtcattccagctacttgggaggctgagacaggagaaacgcttcaccctgggaggtggaggttgcagtgagccaagattgcgccactgcactccagcctgggcaacagagtgagactctgtctcaaaaaaaaaaaaaaaagaaaagaaaattttaattctgaccatgtctctttttcccctacgtattttaatttattgcaagtaaaaataattcttaatatttactgtgggtattcatagctagtctgttttagtgctagaattataaccaaatttggggtttgtattttatgaaattactttttgcaggttttcagtagggattgatcttgtattgtctggaaaagagccagaccatacctgcatatgagattcttgtggtatattcattctaggacttcaggtgtggctagctggagatctcagctagcccctccttcatggcatcctctagtcccaggagtaggaaactcactaatggaggtgcccagatgaatctagctgcagggcatgatttctcctgagccctggaccaccttgtgtaaatgggtatctcagaggccagaatgttctttgagatgaagatgaaatatttttgttggcattgtctcattctgctcttcttagagtgcctttatcttaagaatcatatagtcagactctctttgaagatagcatttaaaccatttttggaagctttcacttaatttttatttttaaaaccacagtcattacttacaatgcgcataacagatttatcatctttttctttgttaggatttgacaggtctggaacacatgctaataaattgctcaaaaatgcttcctgctgatatcacgcagctaaataatattccaccaactcaggaatcctactatgatcccaacctggtaagtggaatgggttacttttatgtacaacagaaagtacatccttatcaagtgttacttacagcatttctgtatagcacttcagaactagcagcaggctctatggttttatatgtctttgttgcaaaacagtagcacaggtaatccgaatcattcatagcttgctttggaatcttactgttcaccccatagatgcgtaatttggatttgttgcttatattccataagcggatgtcctgtttactaagggtgacagaaaatagccccagagtattctcattggccagagagaacaatcctgaggtttaaccatcaaggaaatattcatcacatggaatatcatcgttcatcaaagctgaattgctttaatgctggcacttactccattttaccagtaggggcagtgggtgattaacacacgactgcattggaatgtcatttggctgaaataattgaaagagtatagattataagagacattttagtttcagagaggttataatgtgaagaaaatcatagaattgatgaaatgaatataatacagccattaatctgctattttctgttaattttttactgataaatggaaaaattctttttttttttttttaagctttattttcagggctctttttcacaaagtaatcttttttttttttttttttttgagacggagtctcgctctttcacccaggccggagtgcagtggcgctatcttggctcactgcaagctccgccttccgggttcacgccattctcctgcctcagcctcctgagtagctgggactacaggcgcccgccaccacgcccggctaattttttgtatttttagtagagacggggtttcaccgtgttagccaggatggtctcaatctcctgaccttgtgatacgcctgccttagcatcccaaagtgccgggattacaggcgtgagccactgcacccagcgaaaaattcttatataataaaattaggtggagaaaataatgggtactaccatatagacagtatgagttgaactataaaaatcctccaagtacatatacaacacacataccccaaaagacaacagaaatgacagtaggttaaatcacaggtagtttttaatatcctttttgtacactagagtttttcatattttctacaatgagtagattttgctttcataatcagaatgaagtggtatttttaaaaaattacgatcttgcaaatcttcaagccatgtataaataatgactgcagataggacacctcctccctcatgaggagacacagtgtgacaagtggcagccattggtgaaagaggtcagcatagcagccatcagagcacatagtatgagtgttgcctatcacgtgtagattagtttagcatatggcatgggttagtatatggatatgtgccacttaaaagccaattctctaaatgtgctaagacttaacattaccaaattaataaagttgagataaatagaggagtaagacctggtatcagccttaaaggaacttgctctagtgggattagcagataggaatcagcaggtcaagaatgagactagggctgggcacggtggcacgtgcctatagtctcaacactttgggaggccaaggtgggcggatcacctgaggtcaggaattcaagaccagcctggccaacatggtgaaaccccttctatactaaaaaatacaaaaattggccgggtgcgatggctcatgcctttaatcccagcactttgggaggccaaggcgggcggatcacttgaggtcaggagttcgagaccagcctagctaacatggtgaaaccctgtatctactaaaaatacaaaaatgagttgggtgtggtggcgggttcctgtaatcccagctactcgggaaactgagacaggagaatcacttgaacccgagaggtggaagttgcagtaagctgagatcgcgccactgcactccagcctgggcgatagagtgagactccgtctcaaaaaaaaaaaaaaaaaaatgagactatgagactatttgtgggtcgggaattcaccagacgcctcacacagagctggtacgcagtcaggctgataacagaagagcagctcgtctgtgtacttcagcagtttatttggggtttttgccatgatccaataggataaagtacttcaggtttggtttgtgaaaaatgcattataaactctattatataaatggtagtaattgtttgccagtatgttcttaaagatgaaaaagatgtatatgtagtcacagttggtgtttttcttacctccagagagcatagaatcaaagttaaaaatcagaactaagattaggactaaattgccctagtttcagctctgatgtgatatctgatctacttatattttctcatagccaccggtcactaaaagtctagtaacaaactgtaaaccagtaactgacaaaatccacaaagcatataaggacaaaaacaaatataggtaagtagtacacgcatactccctttgtttagtataagagtaatcacaaaggtctggcttttttataattctacaatattttgtctattaagcactgttctaaaatttatatgagattgtttgctgtagtagtattaaaagtttaagttattttgtggatgttgagtccactacggttttaaaaaatgtattttctattgaagttttattttttatatccatgtaattatttaaactcttcaaatatgttttgataattaggtttgaaatcatgggagaagaagaaatcgcttttaaaatgattcgtaccaacgtttctcatgtggttggccagttggatgacataagaaaaaaccctaggtactgatttttatatataatttttaattatgcaaataaacctgaataaaaggactggaaagaagggagtagcttatttctgtatggaacagaccaaaaggcctaacagtgcaggcagtgttggagctggtggttgagtgagagataggagttgcaagttgagatagggtcccccatgcagagggatgagcctgaacttcgaagaactgggttctattaataacaagctgttcagagagacccagggacagatcgcattgtggggaggtgaggccaggcagctgggacattctagaaatgcctttttagaattatggcatttctaaaaaggtacttccagaacagttgtttagatggaattcaaagtaaagttcagattagcttttgaggaaaaaggaatgctaccgtaaatgtgaaccttaatccagtatactccagccatcctttggggatgaataaattttcaggtttacctaagtcttaacaatttctttactagccccttaactgttactttagcaggtttgataaaatgtgctaaaaatatgcatttttgagtttttaactttagtgggaagtagatgtttcatcaacttctttggaaaataaagacactggcatataaactatatttttttgagacaggatctcactctgttgtccaagctggaatgcagtaatgcaaacatggctcactgtagcctcgacctcgtgggctcaagcaatcctcccacctcagcctcctgactagtggaaccacagacatgagctgctgcacccagctaaaatggagtatttttaatttctgggtcttttaaatgcatttggaggtctttagttttacctcactgaaattaggattttaattataaataatcaaagatgtgaaccttacagacattttaaagccattatattttttctataaaccctgttctcgtttggaggagaaagaaattggaattttcaaaaaaaataaaaatacctttaacacctatttagtgtctttagtaatccagtaaaatacttgattttttacaaaatgtttcccacaagccaagcaaaccataagctacaataataattacctagcgtacagccctctttgcatatgctgttccctccacttgaagtgtactgtttaatttcttaaaataactttagcttttaagaaccaattttgatgggagtacagacttcccccattttcttgatgagttctctccgtcatgtgtagtaataatgtgagaatttgcagtttttagttgtagcctatacttttaggtctttgtgccaatttgaaagttattgggttagagtattcatagacattttcatggtacttaaagggacaggggtttagtaaaaagacacatggcaagccaggctttttccacagtttgccaggcccagctgcctcttgtgtacctgaacagattttatcattaacccttgtttatgttgttttgttttatttcgacgaaggcttattttaagtcaggcatggaaaactagacttcagactgacttcagctttaaggacatgtttatcccgttaacagggagtctgggatagacaatctccaggctttgtttttctctgaatttcttagctctgcttgtgatggcttcatcatcaggccacagaccattaacacattctagaactttaacattggttaaataataccatctaatagcctgtcttcagcatttccccagttgcctccaaatgcccttcatagctgttctctgcctctgtttgtttttaatccaagatacactcaaggctcatatattaggttgacatagctctttagtatcctttaatttaaagcagtctccaggtttagagaaagatgaatgagctttcacatacccctcacttgtcttcttcagaagtgtaggctacaactaaaacttccttcttcagaaggaagacaagtgatttatatttatttacttccatttctatttgaccttgtttcatctaaacacacccactccaccactgctacctgattaatattaagtgaatctcaaacattgtatcattttagctccacgttttttgtatgtatctccaaaatataaagattcttaaaaatataaccacaataccattatcaccctaaaaaaatcaataatgattccttaatatgaccaactactttgtcaatgtacacctttcactcctcttaactttcataaagacttatgtgtttttttggtttttaagtttgttggtttgaagttaaatctatgggttttccctccatctctctttttttaaccgtataattttttgcatgtgtatatgaataaatctgattatagattctatagctatcttacactttgtccctctctgattgaatcctagttaacaagtttctatgtctcttgtatttcccataaattggtagttggatctgaaggctttatcaggtttgtttgattttttttttttttaattttggcgaatctacttcaaaagtattggcctacctacaagccactttaatgggcccttagtttagtgacctttgccttgaaaggaacttgaaacaagcaaggaagcaccactgtaatctgcttttttgccagaactgtagcatcttacagcttggttagagacatagtaagcagaaattatcaaattcatataatctgtagctataaggcactgtctctctctctcaattatttacatgatttttctttgtaatataactatcatttcagagaacttggttttgattttttttttttaatctttttgagacagagtctcgctttatcacccaggctggagtgcagtggtgcaatctaaagattgctgactgcaacctctgcctcccgagttcagcaattctagtgcctcagcctctcgagtagctgggattacaggcatgccaccacacccggctaatttttttgtatttttagtaaagacagggtttcaccatgttggctaggctggtctcaaatttttgacctcaagtaatcagcctaccttgatctcccaaagtgctgggattacaggcatgagccaccatgcatggccttcagagaacttggttttaggtacttacggattgtctttcttttttttcctcactgcagcctctccctcccaggttcaagcgattctcctacctcagcttcctgaagagctgggaccacaggcacgtgccaccacatctggctaattttcatatttgtagtagagataggtttcgccatgttggtcaagctggtctcaaactcctgacctcaggtgatctgcccacctctgcctcccaaagtgctgggattacaggtgtgagccgccatgcctggccactgattgtctttgctagctgccaacaaaatattctagtcagttaactacatttattgaacaattaattcaggacactctaaaaggaagtcattaaattaatttactcccatagctaaaaggccatctaccctagttctcttgttttatacgtgaggaatatctaaagaaaaattttatagaatatcattcccccagagaatcatatcagcaaatataccaacttgggacataagtccatttaaaatatatttggaatccacatccttgttttgttaggtcaggattatccatatgtaactaataaccctggctctctgttatttcaggaagtttgtttgcctgaatgacaacattgaccacaatcataaagatgctcagacagtgaaggctgttctcagggacttctatgaatccatgttccccataccttcccaatttgaactgccaagagagtatcgaaaccgtttccttcatatgcatgagctgcaggaatggtaaattctcatgttttatatatgcatgtgtgtgggtgagtgtatacatgcatatgtatctatatgttagtgatgaaatgttttttttatgaaatttctctttttattttttttttttgagacggagttttgttcttgttgcccaagctggagtgcaatggcgcaacctcagctcactgcaacctccgcctcctgggtacaatgattcttctgcctcagcctcctgagtagctgggattacaggcatatgccacgaagcccagctaattttttgtatttttagtagaaacagagtttcaccatgttagccaggctggtctagaactcctgacctcaggtgatccgcccgcctcagcctcccaaagtgctgggattacaggtgtgagccaccatgctcggccaaaatttctttaacgtgttatttgctctttaatttctttgtaaaatgtatagttataatttttattgcgtttaatatttgaaagacatttatttgcattttaagggatttgaaaaaatgtgtaactgggttctttcagtctagttggaacttcatttattcaactgtttgttgaccaatgtgtaagtgaagggattgtttagtataaaatgagaggtacatgaggtcggtatgtgctgagctgatagtgaaagactttggggaaaatgaattaaactaagtcctgaaggcagaatctcagaagtggtgagaagggaacaatgagcaaaagcttggaggtgggaatgatcagggcaatttgggggctagcccagcttagttggagaattcatactgaaatagtggagtgtaaacctggaaaggtattaggagccatttcattcagtacttcaacaaccagactatctggttagcctttataaccaaccaggaaactttataatgagtaaaggattaggttaagcagtttgttttgttttgttttgttttgagacagtcttgctctgtcacccaggctggagtgcagtggcatgatgtctactcactgcaacctccacctcctgggttcaagcgattctcatgcctcagcctcccgagtagctggaattacaggcatatgccaccatgcccagctaatttttgttatttttagtagagacagggttttgccaggttggccaggctggtctcaaactccttggctcaagcgatcctcccgcctcaggctcccaaagtactgggattacaggcctgagccaccgtatccggccctaattttcattcttatatttgttaaatcagctaatttattgagtatctactgtgggaataatcactagcaatattgcgtgtttaagtaacaataccttactaaggccttttttttttttttaacttaactgtaacatggtacttgactaagagcttttcatgcacattctcatttaactattctaacaactctgtagtaggtccattttatcctcagcacagcaacaggaagtaacttgcataaggcatctcagctcctgaatgggggagcccgcgtatgaacctggacagcccattccccagattctggcctacaacacctactaagtgtgcttcatcatcatcactgccgtcagagtagctaccctttttcttgagaacctgttgtacgccaaacactgtactgggcaagatatttactctctacaattaaaagtattgttattgccatgttgcagatgagaacatagtaatgtgagttgagtaacttgctccagctgaagtagctggcaagtggctgatccagcctgactcccagtcctctgcacattccactatattccaaagctgctttataagttttcttcatctttcattctactgccattgccaacatttaattataaagataattttatctttcagtttaggaagatttttgaccctttgcttgcctctctgtgccaggtgctaggaatactaagatgaaaggcatgtggtaccaggccttgagatgctcacagtctatccagggagacagataccaggcaaattgtgatacagtatattgagggcggcaataagagttcagtgcagctggtgtacgtaggaaggaccagctgattctgttacaggaaggtgacatttggacttgattttgaattatgaaaatgacacttccatgtaagaaagagcattcctggtagaagaaatggcatgtgcaaaggcacagaggtgtaagagagtcctgtgtcgagaaaaaagattgtgaaaggctgtatttgaattagacttttttcttttgagaatggacccccaggagagattttttttttagatgtttgtcatgatcagacttcatgatttgagatgataactagtattagtggggaggttggagtggtgaagaagttacttagagtggggcagggttgcctgggaactggaggcagggagacaagtatataagcatttcactagtcctagaaacagtcagtcaggtgtgaaccaaggatacagcctaggcaataaagaaaaagcaatagacgaactgggagacactttaaaagggaaattggcagaccctggcactagaactcctcggtatcttggagttgggcaaatgagacaattaggatgaatattgctgctatctttatgtttttattttcataaggagaagttattactgaatcatgggtcttgtctcccagaaatggcaaggaatggcttctcaccgttttcactttcccttaactcagaggaaaaagatctttaggtggttctaagtgttaactccccaaattcaatttgtgactaaatttaccctcaagggtccatttgaataagaaagaagtgggcttaaaagtaatttgagaggaccttgatttctgtgctgtacaaatggtgtgaatcaggtgtgggtgctcttgcagtcattcccctgccctggaggttgcttgctcctcatcctgcttagttctgcattgtctctcactgcactgacactagacattagttgacagagctggttatgatcctattaacagaagtgggaaatacagggggaagagctgtgtgtgggcgagtgccgttttggatgtgtgacttgaggtagagacgcccaaacagtggaaaatgagaatctgtaactcagcacagaggccagagtttggtagttactagcatatcttccaaacctatggtaagcatttttatttaatcttcgtaaccaattgttcattatttccaaattacagatgaggaaatggctgtactgcctctttttatcctcagtattctcttggctccaggtccagttgattctacctcaggaatgtctcttctgttgcttatttcttttcattgtcactgcttcctttcatgcctggactaaaactaaactgcctgccttccttgtttgtccatccttcaaatggccaacatgtttaccctgattatgtcacacatacccccacctgtctgtttcatccactttcccactagagtgttctgtccagaccccacggtgtggttttgcaaagcagctgcagttcataccctctcgccttcacctggcttagttccccccatgctgccgcatggattcactccactcagtcctgtagggcccagctggccaccgtgccactctactgctccttctctttctcatccatatgcttcctgtccccttcaaggcttacaggaaatgccaccatctctgtggcactgtcctcatttctctaagtttttcacatgactttgcttttgataatgcatatttctgtgtcttatgtgatggcaagtcatcagtcagcatgtcagcaacgcctcagttttctaaacacttaaaagcagggacttcatcttgttcatctctccatatacgcaggaagtatttatcaagaaactgagtgaataaataagtatgagtgaataaaaatgaatgaaagagtggttttgtttaagtgccagaagtaattttcttttgaagtcctctctcctgcctggataacttcactaattcaagtataatatttactatgacataataaaaaatctgaactcgtgttggaaatgtatattgtgtgagcattttagaattgcaagacaatgtttttgtgtttcccaacattgtttttatagaactagtatataaataatgcttaactaatggtagtgaaaccatatacagaagtacatagttgctttcttctctctgcacaggagggcttatcgagacaaattgaagttttggacccattgtgtactagcaacattgattatgtttactatattctcattttttgctgagcaggtaagttttatatattttatgtgggtattaaatggtatttcttggtatactagcatctgaatgttttagaaaatgatacacatttacaatcaaaattttaacttctcttattgtcttatagctcatatgtgaatatgttaaatatgtttcacaatattcaggcagcaaatataacagtcttttattcatttctcttctaaatccattaccagtattctttttatctggaactcaacagattaacttgtagatatcaggctaaaaccaagtagctctaagtatttataaccaaaaaaccatctagaatccttatctaatgttaattttctatgggtctccaattttcttcctctctttcacgcttccttgagtgagcacagtgtcttcagacatcccacggttccgttgtgttgtcccactcacaccagtagctcccatttatctttctttcaatcgctaggagttctccctcctctctcctccttcctcctctccttgtcagcccctctacacctgggctttcctctgcatgcatgtacacacgcagcctccttgaggtgagtgtccagaagtcggagggagatttgtgaggtaaagagaaagggataagagagtcctcattaggctattcacatatcaaatactctgaagaaaaaggattgaaggaggggaatgggcatctttaccaacctgacttgggtgtggcaagtgacttggcctctgcctccaatcaaggtgactattgagtggagcttttctagctgtcactcaaatgaaacgtacaccaagttgacttataccaagaaggacaagcacctaagtactgagagcttcaggataaatgaatgggcttcttgctgtaaatggaaggaaattcaggaaacagagactgggcaggtgaacaggacagcaacttaaccttcatctgctttccagggattgtacatcttgttcttgatgtctgttaccattgttcctggcaggtaaaagtcttatgaaaaatctcagaaaggctgtacctgcttttagaacagggtccagtgagaaacctttgagtctgctgtgctgacctaggatggggaaggaaaggagccctgactcaaaggagcagccattaatggaaaggaagaggagtgtcagtctttcctctatctataccagtagagaatagggaactagagaggcagtctttcctctatctataccagtctatctataccagtagagaatagggaactagagaggcaggaagagggaagggaagggcaggttaaatcccaacactctgctctctactggagtcaaactccttcctcctgccatacctgccaccttcacaaacaaagcagccaatgctgcctcttcctcccctcccaaattccagctcatcattcaaaccgtggtgtcttatgtttgggcaaagccctgcctcctcctacagatgaaggaataagccatcatatcaacccagagacagtgtcttatggctaaatagagccagtttccttcaatagaaagacttgacaaatggacatcttgaaaataaatatgctttggtaatagctgtgtaaaaatctgtagttgtaggtcttagaaaaatgaagcatgggccgaaataattttaatcctcttgggtctctttgtgggcacatatctaggcatactgtccctacaaagctaaacaaaactaatatttgtttttgttttggaagaggaatgatggagatttgtttgttgtctttttaatgtataagattgtggaaatgattaaggtcatatggctcttagaaagtttgatgcacttatattctttcatcaacgtgagaattaaaatgtattttctgtctttcatcatttagttaattgcacttaagcggaagatatttcccagaaggaggatacacaaagaagctagtcccaatcgaatcagagtatagaagatcttcatttgaaaaccatctacctcagcatttactgagcattttaaaactcagcttcacagagatgtctttgtgatgtgatgcttagcagtttggcccgaagaaggaaaatatccagtaccatgctgttttgtggcatgaatatagcccactgaccaggaattatttaaccaacccactgaaaacttgtgtgttgagcagctctgaactgattttacttttaaagaatttgctcatggacctgtcatcctttttataaaaaggctcactgacaagagacagctgttaatttcccacagcaatcattgcagactaactttattaggagaagcctatgccagctgggagtgattgctaagaggctccagtctttgcattccaaagccttttgctaaagttttgcactttttttttttcatttcccatttttaagtagttactaagttaactagttattcttgcttctgagtataacgaattgggatgtctaaacctatttttatagatgttatttaaataatgcagcaatatcacctcttattgacaatacctaaattatgagttttattaatatttaagactgtaaatggtcttaaaccactaactactgaagagctcaatgattgacatctgaaatgctttgtaattattgacttcagcccctaagaatgctatgatttcacgtgcaggtctaatttcaaagggctagagttagtactacttaccagatgtaattatgttttggaaatgtacatattcaaacagaagtgcctcattttagaaatgagtagtgctgatggcactggcacattacagtggtgtcttgtttaatactcattggtatattccagtagctatctctctcagttggtttttgatagaacagaggccagcaaactttctttgtaaaaggctggttagtaaattattgcaggccacctgtgtctttgtcatacattcttcttgctgttgtttagtttgttttttttcaaacaaccctctaaaaatgtaaaaaccatgtttagcttgcagctgtacaaaaactgcccaccagccagatgtgaccctcaggccatcatttgccaatcactgagaattagtttttgttgttgttgttgttgttgtttttgagacagagtctctctctgttgcccaggctggagtgcagtggcgcaatctcagctcactgcaacctccgcctcccgggttcaagcagttctgtctcagccttctgagtagctgggactacaggtgcatgccaccacaccctgctaatttttgtatttttagtagagacgggggttccaccatattggtcaggcttatcttgaactcctgacctcaggtgatccacctgcctctgcctcccaaagtgctgagattacaggcataagccagtgcacccagccgagaattagtatttttatgtatggttaaaccttggcgtctagccatattttatgtcataatacaatggatttgtgaagagcagattccatgagtaactctgacaggtattttagatcatgatctcaacaatattcttccaaaatggcatacatcttttgtacaaagaacttgaaatgtaaatactgtgtttgtgctgtaagagttgtgtatttcaaaaactgaaatctcataaaaagttaaatttttgtctga

SEQ ID NO: 17 - DNA, 102987 bp, Homo sapiens
gcttcgcggcggaggcccgggcaactcttttgaatggaatcgggctgattcatcgccggtttgcagacagagccgcgtcgggtgtgcgccgctgctgctgttgcctctgtcttcgcgtcaccacagaggcaagacaagggtccatatcgcggcatccggctcccgcccgtcttcaggtaagacccagaaggcaggcctgggaggtctggggaggcagccgtgctaggccgccgccagccccgtgctttcctgagtcacgttgcccagctgagttgccacaggaggcctgggccgcgagggaggagcccggcctccttcattctcttcgcctgctctcagggctctctggcagggtcaggtctggatgtcgcctcctttctccattcttttctgtttggccgaattcacatcatgggaacctcttccatctatatagagagaatccttgtttatggcctgtttgtctgtgctctatccatagttgttaaccggtctgctttgaagtttttcaaagcagaccgggaaaacaagggagagagagtagaattaactttcccattgaatacgtttgttttatctcttgtccttcctgtaagccttaaccctttttctgttagtgttaggttttcagctccctccaaaaagtaaacaaaagtcctgcagatacactgcttttggaccttgaatatcttaaaaacaaagtgtgctactatggctgttaacttactttcaatatcatactaattgagtaattgttggtaaattgattacatttctcgttttaagtaaagtagaaatctgctaccgtatgttacatcttgcaacttaattttcctggggatgtagctctgtgtctgtcaaaagaaaaagaatgtaaacttttgagtctataaacctagtgactgaaggaaaaattctcgagaaaataaatggtaatataagttgataaaatattatggaaaggcaggggaaagggtttaaaaatgagcataaaatagagttatagtgtgaaagtgattttgttccactggtcacaagtgtttttttagtgcttctgacttaatgtgtttgagaaaagcagcaagacatgcactgatactgtagaaataacaaaaacatgaacacagttttagtggagatgattaatataatggtggccttcctgtcacgtaaggctacctaccagctgactcatttgaagtttagaggttaagatatatagtggttctgaattaactacagttaaggtgtgtttagtgaagtgctatttagtgaaaaaggctaaatgttgtcttgaatttgtccctaaatcttgccaagggaagaaagttttcaagtgatgatcttttattgatgcttcacctgttgactttgggagtttttggttttttgtttttttttcagcctaaagtgcttggtaaataatacattgccattttaatttaggccgggtgcggtggctcacacctgtaatcccagcactttgggaggctgaggtgggcagatcatgagatgatccagcctggccaagactagcctggctaacatagtgaaaacccgtctctactaaaagtataaaaaaatcagccgggcatggtggcacgtgcctgtattcccagctacctcaggaggctggaggtggaacctgggaggtggaggttgcagtgagccaagatcgcgcaactgcactccagcttgggcaacagagtgagactttgtctcaaaaaaaagagaaaaagctgaattttaatctgtttgacatgggttcatcttattttcatactggccatgtaaaccatgtgcttgttaatatatagtttgtgaaccatatgtatgaaagtcaataaatattattgctgttgttattgttattatcttagaagtggaagagattaatctagtcctcttatttcagtaacaagaagcaactgtgcttttttaattttcaattttgtagtaacgttcatttaataattcagtgtccacctgtgaaagccttgcctgaatatccatgtgatttcttgctcaggaacttgtcatattccctgtttgttgcagtcattttgacatttcgtattctgctttgtgtgtgatactttggtgaccttatttgtgaaatgggagaacttgattaaataatctcttctagttctaaaatgataataataacaattataacaagaatagcaacgacaacatttattgagtaccttggatgttccaggcactataaattgctttggacgtatttttacaacagacttgcaaagtagatgttatccccactttataaatgaggtctagagtctagaagagggtaaaaattagtgtcatatagtgagtaggtggtgacgccggattcaaattgaggtcaactggttcaagagcctttttcactctacactgctgtcctttccctttacatattttttatgggtttgtgtcaagctgcttctacccacctgccccgatagattataaattctctcagtgcatgccactaaatttcttgagtcagccctccatatctttgggttccgcatctgtagattcaaccaactacaaattgaaaatatttggaaaaaagttgcatctaggccaggcgtggtggctcacgcctgtaatcccagcactttgggaggctgaggctcaggatcacctgaggtcaggagttccagtctggccaacatggcgaaaccccttctctactaaaaatacaaaaatacaaaaattagccgggcatgggggcgtgtgcctgtaatcccagctactggacaggctgaggaaggagaatcgtttgaaccttggaggcagaggtttcagtgagctgagattgcgacactacactccagcctgggcaacagagcgagactctgtctcaaaaaaggaaaaaaaaaattgcatctatattgaacatgtatagacattttttttcattattccctaagcaatatagtataactatttgtattgtatttaattgtattagttattatgagtaatctaaaaatgattttaaagtatataggaggatgtgcataggttatatgcaaatagggtactatgccattttatatgagagacttgtgtatccatgattttggtatcctggaaccaattccccacagatacagatggatgctgaaattaggagactccataatagattattatgatgagtctgttctcactcttccttttttttttttttttttttttttgagatgaaaccttgctctgttgcccaggctggagtgcagtggcgtgatcttggctcactgcagcctccacctcccaggctgcctcagcctgcctagctgggattacaggtgcctgccatcacgcccggctagtttttatatttttagtagagaccaggtttcgccatgttggccaggctggtctcaaactcctgacctcaggtgatccaaccgcctcggcctcccaaagagctgggattacaggtgtgagccaccgtgcccagccaccattctcactcttctaagttgcggaaatcttgctttcaaaatcctatttatataattaaatttaatgttgactcactcacgatcttccactggaaaaaagtccttaagaaagtgagaatatgaagttttaactactttgcacaaataagaaaacagaggaattagaaatacagtaagataacaaatacggagtagcttgaaaaggattgagcatcagtctgaaaagtaattttttttttttttttgagatggagtatcgttctgtcacccaggctggagtgcggtggcgcgatctcggctcactgtaacttccaccttctgggttcaagtgattctcctgcctcagcctcctgagtagctgggattataagcacccgtcaccacgcccagctaatttttgtgttttcagtagagacggggttttgccatgttggccaggctggtcttgaacccctgacctcaagtgatctgcccccctcggcctcccagagtgctgggattacaggcatgagccactgcacctggccaaaaattgatttattttaaatccagcatggacatgatctagcaatatcaggttctaatcagacataaagtgagaaagaaaaagtggaaagtaatcaacttttgaaagtactgataccttttttgtactatttttaccagttaggattctaaatattattgtatgtatgacattatgttaggtataaacactttattcatattgtctgataatattttccataaagttaattatatcatgaatgagcttttgagtcttctactttttgatagctgtaaaaacttggtttagatccatcgacctttttattgcttttatttctaagaattgaaagtgttcccttttatgttaagtataacacattcactttgtgagtctttctgctaaattctgcgaaatgcaagtccctatctccagtgtgatttagtaatgtgaaatatgcccagcattttgaaacccagtaagtggcaaactatgtgaggaagaaggatctgtgttggtagccatgctcaggatggggttgccaatgacagtagctagtgtttattatatgcttactatatgataagcattgtgttaaatgtttttttttgtgtccattgtttttgttaatctaaacggctctgtgagatagatctccattttgcagatgaggaaactgaggaggagagaggtaatttactcaaggacagggaacttgtaagtgtcagagccagtatttgaatctggcactctgactgtagagtcatagtacttgactctcatgtaccaggcaaaatagtcattagtcatcgccatttaccatctaggtccagtagaccataaaaggatagtgaaaaaacaactgtattagaaatgttagtaaagcttaaacatagcaaatacaaatttttattttaattaattaattaatttatttatttttgagatggagtcttgctgtgtcgcccaggctggagtgcagtggtaccaccttggctcactgcaacctccacctcctgggttcaagtggtcctcctacctcagcctccccagtagctgggattacaggcgtatgccactatgtctggctaatttttgtatttttagtagagacagggttttgccatgttggccaggctggtctcgagcttctgacctcaagtgatctgcctgcgttggcctcccaaattgctgggattacaggcatgagccaccacgcccagcctaaatacaagtgtttattctgtattttcttggttttgaaggtacatatatcttcatatatcatcctttgaatgggcatcatggtttgaatgaactgctcatcagccatcatgcatgaacctagaacatacttgtcttgtgtagatcagttctgtatttcaaatacatttctagtaggcgctagctgattacttctggttcttgtatttgtcatcctgtgtgtgtgtgtatgtgaaaatatgcatcacataaaatttactattctaactttctggtgtacagtttagtggcattaagtatattcacagtgttatgtaactgtcaccaccatccatatccagaattttttcatcctcccaattgcaatatttttgaaaacattgagagctcataattttgttgaagataggatggccatctttccttcataattgcaaaacatttatatttttagatttataggcaccatttagaattagtccaatgatttttaaaatttctacattatccatttccttttattcacatttgtgtacactttagcatttttccatgtgtgaactgcatcaacatcataaaacatcaaaaaatacgtgacacatctctttagaaaacaggttattgcaaaattttgtgtgaagtcctttcttgttgaataagtaactgagtaagaatgtcacttttttggttttagaaatatattgttcactcattgacactttaaaaaataatctattaaggggaaattcacataatataaaactaaccattttaaagtgaacagtttagtatcattttgtccattcgcagtgtgccattaccacctcagtttagttccagaacatttctgtcattccaaggtaaaaaaatatcttagcaatttagcactttctccattttcctcccttccccacccactgataaccaccagtctgcattctgtctctatggatttattggatatttcatatacatggaatcacataacatgtgagcttttgtgcctggcttcttttacatagtgtgatgttttgaggttcagctaacttgtaacatgtaccagtaagtagtacttcattcctttttatagctgaacagtatttcatattacaatattcctatatgtgtttatagtagaatttgtttatccattcattttttggtggacatttggactgtttccaccttttggctattgtgaatagtgatggtgtaaacatgcatgtacatgaacttattttgagtatttgttttcagttttatggggcatataccaatgagtggagttgctggatcgagtggtaattctatgtttaactttttgaggaactgccaaactgttcccagcactcattggttcttaagtttgagaaaattaatctagggtattatcatctcaagatacatagtctgaaattttgtttatatcagtggttctcaattgagagtgatttttgagacaatcaagaatggcttcaaacatttatcccccggggacgtttggtaaagcttggagacatttttgattgtcacagctggataggtgctgctgttgtctagtggagctagggatgatgttaaacatcctatgatgcgcaagacagccccacgaacaacaaaaaattatctggtcctgaatatcagtagtactgaagttagtaaatcctggctaattttattgtcatcattagagactagagtgctataatctgtctccttcccattcatctttgattttgtagtaatgtgaaacattttctttgttgctttttttccttttgccattattaaaatgaaaaattctgatttcttaactgtgctaaatgaaaactgaaaaaaagactacagagatgaagtctctagtgttctatatctttttgaaagatgggtcagtgctttctacaacacaataaaaatggaaggatgatgtaataactataatttttttcactattgcattattttccatattcttgtcattttagtgtttttggaatagttgattaagaaatgatggactactaatgcctcctagtatgataaaatagcaaattttcagggtataagaaaaataaccactaatattccatactatttgatagatttgtaataatgtacaattaacctacacagtaatgacatgatagaatgaattgtcttatttaaaaatataagtaaatttttattttattctttttttttttttttttttgagaccgagtttcactcttgttgcccaggctggagtgcaatggcgcgttctcggctcattgcaatccacctctggggttcaagcgattctcctgcctcagccacctgagtagctgggattacaggtgcctgccaccacgcctggctaatttttttgtatttttagtagacacagtgtttcaccatgttagccaggctggtctccaactcctgacctcaggtgatccgcccgcgttggcctcccaaagtgctgggattacaggcgtgagccactgcgcccagcctgttttgttcttggaaagatgtctggaaagactaaaagttttgaaatgtctgtcttcaaagttagtgttcatgagagaaacatacagataaaatttggatacagggttaatcactgtgctctgtagctccctgtaagggagatcattctatactctcagaaaaagattattaaaaaacagttttgatttctacttcatttttatgaattttgattcttttaaagattttggtataaagttttcctccttaaattatcaaaataattatattttattttgtttactttttttaggagagaaagaaaaaataaaatatacttggggaagttgtacctgccagaattagcaagagctttctttaagaagacatttgtcaaactcaacaaattgaaggttaacaccttaagagttgtagttactgaccaggtaaggtttaaaaatgtattttacttttaattattattttacggatggatagagagatagtatgaaaatgtattatttttaacagatgtcaaattatgaatgtgattgataaccagattttgaaaagtggtgtgatttagaatatgtatcaatatacttcattaccaaatgttagtatttttattaaacctggttatctcagcttaaagttttaatttgttaaatatgtttcctctttgctgtgatatctaattttgctacagaaacaaatttgacctgccagattttctttctctctgcttcttgcatcactcatatatattcacagcatctggagtctgtgtaaagtcatcagaaacaacacagagggatagataaactgaacacagctgggaatcagttttggcctagaatatatatattctaatgtatactgtatgttgtttgttttttctgttggttctttaagtttgtaaggttgaaatggtccaaaagaaatttttttcttctttggtaatatattctagagaattgctttaatattataaaatatacaggattccccccgccccgtttttagcctttaaaaagtgctgtgtgttgaatgccatatttgatttgaggaatttcaatgagtatttgatggagattttatttgtaaatgttgctattaggaggatgagttaagatcgtgaagtggaaattttgtctgtattaccacgttttcttatatgccttttcattttaaaaaaggaatttttaaaattgtgagtcttataaacatgttacatgaaacaagccagatacgaaaaatatatgattccgtttatgtaaaattcaaaagcagccaaactaatctgtgctgttgaaagttgaattttacctttgcagggtggaatagactggaagcggggcttgggtggcgtttctgaggtgccaataatgttctgtttcttgaactaggtgatggttacatggatgtgttcacttttgaagattccatggccatatcgtttgttttcttttctgtatgtgcacttgagtgaagttcttttctgtatgtggacttgaataaagtttgcgatattaacattgttaaattgttaccaggattcaacaaaggtgattggtgggggataatatataagtacattattgagttttagtttatatagcaatttgaactcgtaaaacaacatggacgaaggatgaaatgaatcttagcatttaatttagaatataatttgtaataataccattttcttaagcatacacttaggaagaagaggaatttcatttaggacatagcgattttcaagtagaaaaaattgctttgttgtcatttttaaattacttagttgtactgttattaacttttaaaatttgattacttctttttgttatttaaggccatataagtacacttgatatttcttaacttcttctgtgaggttttcaagcttgtaagagtatcttctgtagttactctaaacgttaaaactaaatcagattgatatagtaaatccactttgtattggttaactctgaagttataattgagaagcacagttgaatttccttagtgaaaaaggtgtatatatctctacaacatctgaaacaacacaaaatatctgtgtaggttctagaacactatcttaatatgtttaatgtttatgctatagtatttcttttagtataatgagttcagtttttaaaagcctttgatgctaattcagagatccataatctgctcacaatgtctttcacatgtagttttgatggtaactgacaagctgtaagttaattagcacagaacttactaatgaggatgttaaaatttaatttaaaagtgaggatttttatttgtacactctggaccaattgaaggaaattcaatcatacatatgataagcatttcaggcactttttctacattcaggtactttattagataacaataagaaaatataattaacttaatgatagcaaagttttgaaagtatgctaagattgcttgtctttaaaactggggataacccaaaaccaaagcagtaaaataaggtctgttaattagcatggaagacagcttcttgaattaatatgtggtgttaattaacaggaagtctgatgttgtgttgtaattaccaccaatatttttgacatactgagtgactgaaggtgaattatatagatagcaattgaataaacatttttgtgcttaggaacgttttttctttgtttctgttttctagaaatatggacagacttcttagacttggaggaggtatgcctggactgggccaggttagtatatagtctcttgagcatttccttgtgtgtaaactacaagcctttttgtagttagccaaagagaaagaaattatccccaagaaaatcacctaacagataactctatggtaagaatcttaccttattgatgtttgttatcttgcaacactagataacatgtggaaaacatttattgtcttagtttacttttctcctgggaataagaattttctgttatttgctttgtttaaaattttgagatatgtaggattatcaaagttggcttttaggaaaaaaaaaccctcaaaatagcttacttcctgaatttacagtgtaaactttagatgtaacacaagaaaaagtaagcatgtcatcctgcttgccagatccagaaaactgacccatagaatgtttatatgtacagtcttaacactggtaaatttctgctagtaattatgatatatagatggattaataagtaatctctctcctttaaatttggtataaatggtttcttttataatctttttaaaaaataaataagctttcagttgttttaatattgtttatcttgttccatttgctgttgggcaaatgacctctagatttctgcctcaggatagtctatctgctttcagatcaagaatttgtgcctcttgtgagttcgacactttcgatctgtgcagtcatacattgagttaatactaattaacaaaagaaatgactatgtgtatttctcttcctaagacttttatatatgcaatgtattgttttatgaccaaatattagaaatatttttatagtcccttttaaaatctctttagtttccagctttcccacatttccttactgctatcagtgacttcatctttcttcaaagtaatctgtgtttactataagaagcagtttttgtttcagacttcatgaaattttcagtgttttagaagaactttcataagaactgtttgattaggtctatcatggtttatgacttttataaagttgaaatctttttgtgattctgtattgcattcttggatggatttcagttgtttttcgtttacttttgttagttttgatgatttctcatgtttctttgttgtcagcctatttcttcatgattcttcatttttataacacctgtataactcattctctcaagaggcctaagcctctttgaacttgatcctgaacctgtttccattcttttgtaaacattctagagagcttctagaatttctctaatttattctgaaattagtagtaatagtgttcaggcatgtgaaaatgtgagaagtgagcagaggtggtatgtagatagtgcagatttacctgcaaattataggtgaagatgttgccttagaattcttaaggaaagttgtatcaaatttaaatataaaaataactttccttaagcatagatacaataaattacccatcttggaaatccatgctggaaaacccctggacatgaaataatggttttactgaccacaaattgagctacattatatgtcaatggcgacttcaaagctttatatcaagtgaaaaacttaatgttttttcagtaaccttattggtttctgattaatcagccattgtgtccttagtttgtactcttttttgaagttaaaaatctgcttaagaatcatttcatctcaattagatgataaactctaatttgtggaactcttatttttatggtatctcccttatcctatactaggtgtaattttctttttctctaaaattttattttatcttgttataggaataatttgacaaatacttatgatgttacttttgtaacatgaaacgttaagtgtatttttttgcctaataagaatgttgtttattatttatttatttattataatttttttttgagatggagtctcactctgtcgcccaggctggaatgcaatggcatgatctcggttcactgtaccctctgcctcctgggttcaagtgattcttctgcctcagcctcccaagtagctgggattacaggcgttcaccaccacgcccagccgatttttgaatttatagtagagactatgtttcaccatgttggccatgctggtcttgaactcctgacctcaagtgatccacctgcctcggcctcccaaagtgctgggattacaggcgtgagccactgtgcccagactattatttatttttaataagaagtcaaagatctttggattgataatagctatcttttcattagataaggcataggcaccaatagtagtaaaaaaggagacacaaattggcccttctctccaaaaatcagtgggaaatgttatcttaccatttaatggaaaaggcagaattccctcccaaataggagcaggtcacttgctggtaagtttgtagatggccctcttaaaatgtggcagtagacaggagcagaacaggtaaaggcctcatatgattgagagttccttaaggttattttatttccttgattgaagaacaagaaccatggacattttatgagtgaataggccaccttaaatcatgatctatacgaataacccaattttgatgaacgaaatgtccaagacatatttttttttatatcagtgtccaaacagttgctactttactggcttgaagacattttgtttcactcccaattgacacaaacctggcggttactgtcagactctgcaagttaaaggctcacttctccacagaactacccttacttcagatgccagctatacttcatgtgtccccaagccatccacactttggactgacactttaacctgagtataaatttggaggtcctcacaacctcctcaggtttgataattcactagaacaactgacaaaactcaagaaagtgctgtgcttattattacaattttgttatccagaaatacagattaggaggaccagtgaaatgaagacacacaggatggggtctgggaggagatgcagagctcctgtgccctctcttcatggaattagggcatgtcaccctccctgcacatcagtgagtttaccagccagggaactccacctggtgtagctttggtttccgagtttttattgggactcggcatacatgagcttgattgattaaatcattgggtgatcaaactcaaaattcaaatctccatcctcccttcccaaatgggcctggctcaaagtcttagccctctaattaccgtgttggtctttatgttgatcagccctcatctgcaagctatctaggggtgtgcactaagtcacagtgttagcataacaaaagaaactccaagggtttttgaggctctgtgccagaaactcaggataaagaccagattattacgcaacaaagacttgttttcagccttgacttcattatttgtagaaacaattcagtatttcatttgaatttttcttgtactatgatactgatttttatgttgtttccaagagacatgaccccaccttgagtcccagtgcctttaatataacccagtagtagtaaaaaggtctttgggctttgctctatatgctaattggtcatgttattgttattattattattttgagtcagagacttgctttgttgcccagtctggagtacagtggtatgatctcagctcactgcagtctcgccctcctggattcaagtgattctcctgcctcagcctcgcaagtagctgggattacaggcatgagcctccacgcccagctaatttttttatttttagtagaggtggggtttcaccaagttggccgggctggtcttgaactcctgacctcaagtgatctgcccactgcagcctcccaaagtgcttggattacagatgtgaaccattgcgcccggcctggtcatgtttttttaatggaggaattcacagtaataatataggaatatcagtattataatcacagttgatactgatatttcattgtttttgaggccacttggtcttagttgttttatttgggagttgtagtagggctagtaggtaaaaaaggaacttgtaaataatcaaagtccccattcattctagtttcttaattttctctaaataggaggtgacttttctcttttccaaggctattccttccttgttcttggatctcgttctcttgacacactgcagatctccattgacccctttctctgcctacaaagatgtttaagtctcctgtatccaaaaaccaaaactctactgcatactgccattaaaccttttcttctatttatttctagaattcctgaaataatagcttaaactccataatctacttaattacctctgttcactcacatgagaatgcattctggccaactcctgtattactgtactggaattttttaaactgccaagtctattggcctatttttagttctcttttaactaaacttcaatattccacacttactatcttaaacctttcttttccattagtttttatcatgctgtcttttcctgtttctcattacggtgtccattcctacaaaacaactaagttttattttttttaatatcacattttaaaatgttaatattggccaggcctggtggctcatgcctgcaatctcagccctttgggagaccgagggggcagatgacataaggctaggagttcaggaccagcctggccaacatggggaaaccccatctctactaaaagtacaaaaatcacctgggtgtcgtggtgcacatctgtaatcccagctactcaggaggctgaagcaggagaatcacttgaacccaggaggtggaggttgcagtgagccaaggtagtaccactgcactccagcctgggtgacagagtgagactatgtctcaaaaaaaaaaaaagttaatatttgaatagtgataggctacaataattaaatttgtcctcagtcctccacttcagtttaacttaccagtagtttgaagcagaaataaagatgttttattagtactattaaaatttataaggtaacagctttaaattttaaatgtatttttagattttctttgttaaaatgcttacaaacttgaaattactaaaaggtatgagattattgtattaaaaacatatgttgccataatttggctacttcgttgtctttataacaactccacctaggtcttggcatctaaacgatttccaaaagcagtggaaacagagcccaagagatgagaatagccaaagcatattctgtactttttaaaaattttgatttctccctgggttcattttagctttggaaatagtcaatataagcttgaaagtagatggaacttaagcaaaatgtcagtggcatttagtaacttgtcttcagttttaatttgttaagtcaatattttgagtttctgtgtatcaggtattatatactataacgaattccaagacgaacaagaatatcaatgcctaatccagagccttacattataatagacacacaagcaatcatgttttaagtgcctagtacacattaactactttgaatcagtgaaagctaatgctcattgtaaataacgtgatttgtaagtacagtggaggttagtttaacttcttttgggaaaaattagaccaacttgggaaaaatgggaaaaatgagactaaggagatgatgtttgagctgagttttgaaatatgtgtcaaggcatattcaaaaggctagagaatagatacataagaaaatactgggaaaagaagttggtaaaggagtctgaagttggttatgaaaggtgttgaatgccatacttggtgatttttacttttttcccctaggtgttgtagtttcatgaagattttctttctttcttttttttttttttgaagtatgaagattttttttttctttccagtagacttgtgaggtaatttgatctgtgtttttgaaaagtaattctagtggtagtttggagaacaggtaaaggggaagagattaaaggcaaagtcatcaattacatgaatatttgtgactttcaaccttccaggcatataacaggattatatttttctgtcatctttgaagttagccttgccatgattttgctttgaccaatggaatgtgattggttaataggtcacttttaggtgaaagctttaagaatcagtgtgtgatttgtctgccctggtaataaacaacatcatgatgattgagcctcttttagccaggtccattattgagaatgacatacaacctgcaagttttaaagcaaagttagaaatcacatgatttcacactgtgaaattctgtgtaaaattagggtattttacacagaaatcacatgatttcacaatgtgtaggccaaactaaggacatatgcagcagggtatataatgcctgtaagttgtcactttgtatctctggtacagacctcattaatttcaggatgcaaaaataagggaaaaatactgtgggttagtgatcccagaaggcttcctgaatgtggtgagatatagtgtacattttgaagaattatttccggtggctagataaaaaaaaattcatgaattgaataggatgtattttgttataactcccaaatcctcacagtgtatggattttttgtatattcactaataactttttctggtttcttattgtggtggttgggacagaaatgttgtttcaattgtttgtctcaggttttggtctaatgtttggtagagaagtttaatttaacatagcaatggaaaaaatgactggaataaatgaaaaaataatactgttttcatggatgaggactctatatcaccacatgccaattctttccaattaatcatacattcaacccagtttcaataaaaatatcaaccagaatgttcatggaaataggcaaactgactctagaattcatataggaaaaaatagttcaagaatagcaaagaaattcctaaaaaggaaaaagaaatttgctctaccagatttcgaaacatattttaatgctatatgactgaagtagtaatatattgttgcagagataatcaggtagaccagtataatcaaaaacccagaaatacatccatcaatatatgggaacttggtttgtaatataagtgacattaaaacagtggagaaggagaggcctgttcattagatgatgctgaagcagtggtagccagtaagggggaaaactaaaattagattcctgccttattctatacaaaaaaaaatttgtaccaaatggattgaatatctaaatatgaaatcaaactttataattttttttgttttttaagatggagtcttgctctgtcacccaggctagagtgcagtggcatgatcttggctcattgcaacctccacctcctggactcaagagattcttctgcctcagcctcctgagtatcacaggtgcccaccaccacgcccggctaatttttgtagttttagtagagacagggtttcaccatgttggccgggctggtctcgaacttctgacctcaattgatccgcccacctcggcctccgaaagtgctgggattataggcaagagccaccatgcccagtccaaacttcataatttttgcaggtacacccatttgaatggctattatccaaattaaacaacaacaacaacaacaaaataagtattggtgaggattggagaaattagaactcttgtacattgatggtagaaatgtaaaatggtacagataatatggaaaacattattattccttaaatgattaaacataggattaccgtataatccagcaattcagcttctgggtatgtgcccaaaataattgaaagcagagactccaacagatgtttgtacaccaatattcttagcagcattatttataatagccaaggggtggaaacaactcagatgtccctcaacaaatgaatggataaataaaatgcatatacactcattccttagtatcctcgggggattgattctcggacctctgatgataccaaaatctatggctgctcaagtcccttagataaaatggcatagtatttgcgcataacctagacacagtctctcgcatacattaaaccatctataaattacttataatgcttaatacagtgtaaatgctatgtaaatatatataaaacatttttattttttattgttgtattgttattttttattgttttttccctccgatattttctatctatggttggttgaatctgtggatgagaaacctgttgatatggagggctgattgtacatacaatggaatattattaaactttaaaggaatgaaattctgacatatgctacaacatgagtgaacctaaaagatattttgctaagtaaaataagccagacacaaaagacaaatgttatatgattccacttacatgaggtacctagagtatcagattcataatgatagaaagcagaatggtagttgccaggagctgggaagaggagagaatagggagttattgtttaatgggtacggagtttcagtttaggatgatgaaaaaagttctggaactggtgttggagatggtggtattggttgtgcgacagtgttaatgtgcctaatgccactgaattgttacttaaaaacagttaaagtggcaaattttatatatttactacaaaaaagacatttaaaagttcagttaccgtatctttaaaataaggttgataataccaaccagatggttctttataaggattaaataaactcacatgtgaactagtcaggtgcatagcagatacccttccccaatccccccattttttggggcagaaatttttatgtctttatgacctcaagataggaaagcacaactcaaaagattcataatttgactacctcaagacaatattactaattattatccccaaaagactacagaaacaaacttataagacaagcaaagatgaagacaggatactggcaacacattaatctgcaacaccacgtagttcattcagcagaaccatagataagtaagacaaaaagatgacctcatttaacaaaagaatgtgaaataagaatggccaaaaaaagttatgaaaagatagtcagtgtcactgtatatcagggaaatgaaaactaaaacaactattagattagttaaaaaacaaacaaacctgtggaattaagtgttaatgaaaattggggaagcaggaattctcatgtaagctgtgtgtgtgtgtgtgtgtgtgtgtgtgtgtgtgtgtgagatgttggttaggaattatagctcagtgcttagatctttacccggcaaataacagacaataaatatatgttaaatggacacaccatatgtggtaaatggttaaagtcacttcggagagcaatttgacaatatctagtaaagttgaaaatgaccaaaattctgttactaaacaattccatttattcactttagggaaacttttatatgtctatatcaggagacatgttgaagaatattgttaaagcattgtttgtatattaaaaattgcaaaatatttaaatgtctaaatgtgttatgatgaaattaatgcagcagctaaaatgaatgaactaggttctatataccaatatgcataatagaccttacaaacatagtaagagaaaaattcagttgtaaaaagatacatacaacatggaagcatgtaaatttaaaaaacataaagtaacacctttttttagagttatataactcctgagtaaaaatattacaagttgttctacagaagcagtatctagtacaactttctacagtgatggaagtgtccatatctgcaccattcaatacggtagccactagtcacatgtttgttaagtactggaaatgtgactggagcagctggagaactgaattctaagtgttatattacttaaatttaaagagtcacatgtacctgttgagtccatgagatgtatcttgtctaactgaataactgaatttctaattttatttaaatttatatggttatatctagctagtggctaccatattgtacagcgcaggtctagataactcacaacaaattcatgaaaaaaggagggaggcaaaaggaacttcaactttataatgttctctctttagtacacaaacataaaactaaagcaaaagaacaagtcatggaataacactaaataacattaaataacattaaataacatttttctttagtactttttagaagagccaccaaataaagtcagaaattcatttgaatttattttttagtagttttttaatgccttacctaggtattccattttctctcccagtctttaatttgaaggcgataatactagagaggttaccacagtatagatcttgcagggccctgtagaaaattctcttctgagtgagttgggaagctattagagatgctgagcaaaggagttatgcttatcagacttacatttttaaagaacttggacactctgaagatgaagctaccacaataatgttttaaaataaattacagattattgttctatttttattctatatctgctagagcaatcctgccatgtaatgaaccatcatagatcattgtgtacaattagtctttttttatatctgtcacatctgtcataaatacaagctttaatttttgctataagcactggcatagtagtatgcaaatgagcagacctttacaaaatgttttcataggttttctttatattctttgaattatttagcttagctgtattgacagtatttatatgctcatgaatattctggttaccttttttttctttgagtatctgatgtaatcctttatacatttatgaaggtcctttctaaacattagtagattaatttgggcattttctcttaagaagtagagaagggtcgaaaaattttaattgttttatttcttagcttaactacaaataatggtgattttgctttagaaacaaagcagaattacaagatgcctttaacgtttttcttatttgctgctcttgtgaggttataattttattaaatataggtcctaatcattctattcatatactctgatatttatacgatagaaaattaagaaaggggtcaggtcaaaagcaagctaattagagcatattctttctagtcgtcattgtagtgtgattattctgaatacgtattaaactctgtgaaaaatagggtgttcctgagaggcctcaaatctagtcttgagggttctcagataagtaaaagggacataaattttccataggtacatgatagttaacctgtgtcagtttgtttgaatattttaattgtgataggtcttttgagaggaaaggtctttgacacctgtgaatgctaaatttctattttgatatgcaattatgataaataaatttgttcaagttcttagaatggaaggggattggtgataaattttcagttacagtgaaactgtccttcaaattagtgacattctgatgaaataagaaaaaataaaaattgtgaaaagtaatgaaatgtttaaagttttaaatataaagtcaaggatatgatggatttatgacatctgataccatttttggtagaaagtatatgggaaagaagacagaagaagatatctctgtctaatatgggaaattaagacattgcaacataatctcaatattccaaatgtatgggacgttatgatcaaagatacaatctgtgttttctttccctaccttcaacattgttttacacatttgatttactggttacattgctatttggcacattgatcttcgggtttcctatcttaaacttgcataatttaatttgtaatttttcagttcatgttatcatttgggaagttctctaattatcagattcatttaaaacccaagcaggtaggactgattctcttacaacacagactcaaggtggttctctgtgggatgttgtctgggttgagtgccctgaaagtatgccaccagagcagggcagtggtctccactgggcagcctctcagtgctgctttttaagctgttgcccgtgattgcacaggctcttcccttcagcagactgaatgcctgtgaagggcataatggcttagggacaatagagtaaataataaaaataataaaaattatgatagttgtacttttctcttactcattgtacattttcccctctttttactcagttacattcttacctgcctgtggtaattttctattccctagtgttgtaaacggagcctgagttattagaaggaaaatgcttatcaaaagtagacagtagaatgacaaaacctagtttttgaaaagttcaccattctgttttatagaaaaggaaaactttcacttcataggaaacaacatatttcactacctagtagaatacatttttgttgtcattgtatagctatatcactatagggagatgattttgattttgctttaatttgtacctggtttcacggtttctggttatttctctcccatttgtgatttctggttattgtattcatttcctgatttctactgtatagactagatgatgtctttggaattttttttttttttttatttttaagacggagtctcactctgttgctcgggctagagtgcggtggtgcgatctcggctcagtgcaacctccgcctcccaggttcaagcggttctcctgcctcagcctcctgagtagctgggactacaggcacatgccaccagggctaattttttgtatttttagtagagacggggtttcaccatgctgaccaggctggtctcgaactcctgacctggtgatctgcctgcctcggcctaccaaagtgctgggattacaggcgtgagccaccgcgcctggcctctttggatattttatagctcagccattctataaggcttttgccttgggagctttcaacttgaaatggtatgaaaattgtagtaatatagggagacagtcagatactgtgaatagggaatgtcattgtaacatctagaacaaatgtatggatctataaagagaacccacatattttgaaatgtgtattaaaattttcctctggaatttaaaaaaaatggggtgggggagcagaggagagccaaaaggactgatgctgagtaccttccttattctgatatgaagtatttatgcacttaattttttaatcctcacaatgatcctacatgggtagggataattattttcatattatagggtcgagtcacagaactaacaagaagtggagctagagctggaacacaactttttctgatgtcccagcctatttatatcaacatttctttaggtagataaaatgaatagagttgtcatggctacttgtttcataaattaatacaacttaaatagtcttgtaatttttattgtagatcgaaagtaagatgcttgctttttaaaatttttgggaaattaaaatatttaggagggattttctttatcctgacatgtaatacttggcccatgttttaagactatttaaggaatttgtgaatatttcattttattccctatgataatgtgaatcttcacacattggtaaaggtagaggttacaaatagtacaacttttaaaagaaggtttacatttcttacttttttacgtctttaaaacgttttccttacagtccagaaactgattagtgcttctaattgccaaaatatgttgttttatttaaaaaaattattttgggaaaaaggcttctcttgttaagctaatttcaatgaccaatcttgttgtaccttgacttgtaataatgaaaaaagaggtacagagagctgttttatttgaataatagacttgccaattagccatcaagtgcttccatctgtgaaattgttgatcagatgggttagctgggatgtttccagactagggcatcataaatggcacttgaaaactctcactttaatgatgaggtttcaagtattacactgcttaatgctgtggaacctttttctccttttgcagtaccatgtttttttagaacatactgatcccatttatgaattctgtggcatcaagagaatttgggagacctgccactgatgaaaagttctgcctaatctgctgctctggcctgtgctgggattacaccagagtgctaacagcttctttcatagcctttccagtaattttggttggggatctgactggcacaggcaggtgatgctcattgcttatgggccatggagctggcacactttggcaagtttctttgcactttcccattaatgtaaactcattttcaaatatctcacccccttaaataagtgtataagagcatagtagcctaaggccacattagtgttgagatttctacgtgtaccccttgtgtgaaatgactttagcatctgtcttgtacatttttgaaggatttaaattgcttattggtaattattacattttaaaatttgtttaataatagcatagaaatataaatttctggaaataattgttgtatgtctttccttactgttccatatcttcattgctcatccttatattttataggaagtttccttttttagtaagttgacttcctcaaatgcctgtgcatgtgattagatgttagagtctctgagtgacattttcccttggtaggactgtactgtgcttttcttttcctgtaaatccaaattcctgaaatttggccagacttctgggttaccagtctgtgtggggtcaaattcatggcccatgtcactttttggacagtagcatggccttctgcctgtcctggcacaggtttcggacctaccaactcactatgaaaggcagtatatattgggcagtggtaaaaacccagggctctggagttaggccagatctagacactagctgagatccatggaagaggaagagagaatgagaatgcagtgtaaatgttcaagaaagcagatagtttaggatcttgttcctattcttcttccagagtagatcacaatttagcatcattcccagacccttcaacctcctcaagtggacaagctcccaatgagagaaaggtatcaatttttaaaaagattatgttattttgccaggtgtggtggctcacgcctgtaatcccagcactttgggaggccaaggcaggcggatcaccaggtcaggagttcgagaccagcctggtcagcatggtgaaaccccatctctactaaaaatacaaaaattagccaggcatggtggcatgcacctgtaatcacagctacttggtaggctgaggcaggagaatggcctgcacctgggaggtggaggttgcagtgagctgagatggcgccactgcactccagcctgggacagagcaagactccatctcaaaaagaaacaaaaaacaaaaaggccaggcctggtggctcacacctgtaatcctagcactttgggaggctgaggtgggcggatcatctgaggttgggggttcgagaccagcttgaccaacatggagaaagaaaccctatctctactaaaaatacaaaattaagtgggtatggtgttgcatgcctgtaatcccaactactcaggaggctgaggcaggagaatcactttaacccaggaggtggaggttgtgttgagccaagatggcaccattgcactccagcctaagcaacaagagtgaaactccatttcaattaaaattttaaaaattatgtaattttttttgactgcctggccacagtgtcttttttgttcgctaaggtttgtgtgttgttctctctccacagcaaaaatgtccagtagttaatagataaccttgattaatcaataggtttccctttacaggtgaggaaattgaggcatgtagaaattaagtaaattattcagtatattaagacattttttaaaaagtgccttcagagcagaactggaagactgtctttttaaagtgctcctctgtagagcattaaaggaagtataagaaagagaaaatgggaacagatgtgaccatgttgatggaagaatagaattttcccttctttgaccactgccactttttcatgctctttaagtatttttcttctgatgtgttttctttttttgaaaatagagacagggtctcactatatcgcccaggcgaactcctgagctcaagtgattctccctcctcagcctcccaaagtgctgggattatacaggcatgagccatcacgcctgccgtttgatgtgtgtttttctatctgttcccttaattcctcagaaacaggcactgtgtcatcttttgtgtggtatctcaaatagcattgtgaatagatgaatgcttagtgaaattagggtagtggtcagcagtatttctaggaagcctcagagattacttctgtcccttaacctctaccatgcctcagaacttctgagccttttatgcttctaattaacagaattcagggagtttttatgagaaacaaggtatttttaaataggtaaatagttatttttaaataggtaccagtatatgacatgttacttcagaatacaaatgggcacatgttgaatactaagtttccctgttgtctctgttcccttctttagagacaacctctgttaccagtttctttatgtccttccaaagataattctatgttagtattgtccagtggaactttctgtgggttggaaatatattatatttagctgcccagtatggcagccattagccacatagtgctaccgagtccttgaaatgtagctgttatgactgaagaactaaatgtttaaattctgtttaatttaaaatagtttaaattacatagctgcatgtggccagtggccactatattggacagtgcagtgtacacaaaactggattctagagattgtctcatcccatatccatagatataaagctgcatgttttttcttaaaggatggcttgctttcccatttttttagacaaaccatgatttacttaattagtgctctactgatatacacttaggttgtttcttatcttttgatttacaaaccgtgttgtagtaaatatctcattgaagacgttatttcacatgcattttcccagaggataaattcctaggagtggaattactgtgtttaatcagtgtagttagcctgatatggtagaaagaatacaggatttggctttgaatttaggctttactacttagtcactttttagacattgattaacttctttgaacttcagcttccccatttataaaataggcacagtagaatccactttgccagggttatgttattattagaagtaatatatgtaatggtcttctcaactggtattaggagcttaaattaggaatggtagataatgaaagccctactactattacttgttttattaataaagagatcattataagcctagaggcgtatgtttaatgctgaattgtggcagaatagctttgcttcgcccattttaggtttgtaaatatggtctccaccttttattcatttggtctccaccttttattcatttggtctccaccttttattcatttaacttacttgaattatatgtatatatatagccatctataaattacttttcatgtgctaatttataacttttatatcaactggcaaaattgtggtgccttgcctgtcagctgatagttaaatttaagcagagtcaccatattaataaaacactgcttgtatttgaatattttatggcatattggtcggaaacaaggaaatgaagatgctgatactatttacgagcagctgtaggttctaaaaccggatgaattatggaagcatattatgagtttggatatcaattttttctttagtattttcagtgatgttacttatttgaaacccttagaattacattgaagaagtaaactttgcaacttgattccttgaccacagttatatttattatttatttatttatttattcatttattttgagacggaatcttgctctgttgcccagactggagtgcagtggcgtgatcttggctcactgcaacctctgcctcctaggttcaagtgattctcctgcctcagcctcctgagtagctgggactacaggtgtgcgccaccatgcctggctaatttttatatttttaatagagatggagtttcaccatgttggccagtctggtctcaaactcctggcctcaggtgatccactgcctcagccatccaaagtgctgggattataggcgtgagccaccgtgctcagcctatgtgttatttttatattcttaatacactggcaattattaataagctcattttaagttttccttgacttcattttttataaacattaaggaagttcttttttcaaaaatttacactttcatatgaatcatttactttggaagtaacttattcaaagtcatttaaagaaaaattaatcttttaaaaaccattaaccaagatgtttacaagtatgctgattaagaatcaatttcaggaatgctctgtatctgtatgagcaagagggaaacgtgctttgttttgtttgtttgtttgtttttggtaaatctgagtacctaaaagtctcgtttgggagtgaaactcaaggggaaaaacagtgttaaattttattcctaaatttagtatttgtttctaaatcatatatattttgttgaaattagaattgctcttttttggtatcagtaaactaaatattaaaagatgtttattgttaggagtagtagtagcagcagctgtgtgccagacactataccaaatgccttacatatgttatctcatttaatctttacattaaccagtaccacgtggtatgattagcaccattcacaagggaaaatgggtcatagctttaagtggttaagataggattaaacctcagacttggtctttctaattctaaagtatctctgcacctaatcaatattttagtttgggagagtatcattcagattgttaataggcattgctatctttgtatactgaacttataggaattaaccagtgcagaaatgattgttcttagtttatggtgacggtcccatggctgccagtgcacatgactgtgaacagtaagtagtatatttttcaaagtgtataaacaggtacatttgcagtaattgagatgatgtgctgtagcaggaaggggattagactatggatcaggagataagggttctggttctcagtgtatgtcttgacctgtagcctgcacaagttatttaatttatatacatttattttcctatctgtatgcctttaaaaagtatgattatactctctgactacttaattgttacaagaattatactctctgactacttaattgttacaagaataaaaagggatgagaaaaatctaaaaacattttgtaactctctgactacttaattgttacaagaataaaaaatgatgagaaaatctaaaaacattttgtaaaaccatctagtactcaataagtaatttaacctcaaagatgaaggtctccaagcacatagccttgtggtgagttgtagagcccttgatgaagcatccctaaggtagttttttcttttttgcctagaatttctctccaagaatccttggaactatatttagagctataaattacgagaaatgaagttctgaaactgcgtttgtgtgtgcacatgtgcgtgagcatgtattcacaggccctataacgcagttatattgtaggtagggttaggagagtttttttttttttttttggaaagaaaaacttctcttaaaatttttttatttgggcctttctgaatgagtactatttttgccattgataacctgtatttgttgagctgctgtactcatattatctactctgtaagccttttttctactcttttagacttggaaaagcattttactttgtaatcactgtgtatgagaatgatcacaagaggaagtactaaaaaaggcattcaataactttataatactttttgaattttgagaatttcagtataggagtatttataggccttttgtatgtttttaatagcttaattgagatataattgacatacagtaaacgataatatttaaagtgtataatttgttaagttttgactgtatttactcaggaaaccatcactgcaatcaagatggtgaacatccatcattctcagaatttacatatgcccccagtgtagtccctttccttgcacttctctccccacccccagactaccactgatttgctgtcactatacattagtttgcattttctagcatgttaatcagtgggatcatataataggaactcttctttttgtctagctttcattactgtaattgttttgagattcttcagagtgtgtattcatatttcattttttttgctgagtagtatttcattggatggatatataacactttgtttatccattaacttgttcatggataatttggtgtgttttggtttttggctgttacagataaaactgctgtaaacattatgtacatgacattgtatggacaggtgtttttatttctcttgcttaaatacctaggattagattggctggaccatatggtaggtatatgtttaacttcttcaaaaactgccaaattgtttttcagattggttgtatcatttatattcccaccagcagtgtgtgagagttcccgttcttccacatccttgccagtacttgatatggttaatttttttaatttagccattttctagtggttaatagtatctgattgtggttttaatttgcattttctggatgactgatgatggtgagcatctttttatgtgcttatttgccattcatctatatattttagggatatattcatgtgttgcctggtttttactgggtgggttattttgttaatgaatttttttttttttttttttttgagatcatctactcaaagtttattggactgaacaaaggctgaatacagagatccaagccatgaggagtacatgaggtgtggtgcctataagccagggtcggaaactttccagacaaacctagatagctctactaggagggagtcaacgacctattgtatcaattagatcccagcctggacaagggcatgactattgctgtttggggacacgtggctctgtgttgaaggcaatgactgtgtggctgttgccatgtggcctgttctcccctaagccctgaaccaaaggttccaggcccagatgagaaggccactgggaatgcatgccataggggttgatgctggacattccccagccttccattaaatgaaaacattttctataaacttactgctttaaaaaaatgttttaaccaacaaacctaagaactgcaaatgagtttggtatagtataaatattgtcaaatataaaattccaagaaacgcatttgagactgatctgatgatctgaagttctaactaatctatcaaactttctaagaaaaggcataggtcaagaaatctttttaaagcaaacattattgcttctgctatagcagagtggagatttggctgagctggtaagaacctcagtgaaaaggtgtcttagcaatgaaagggctgaatccgagattcctctagatgaaaaataaggggaatggtcaagtaaattcctggtactggttctttgctgccctgtaatcaatatggcatctcacccccgacaaccaagccagccagagagagaagtggggttcccagggaaaagggtcggctgaccaccctgacggagctggtgagcacaggtgagctctacctcatttgtctctcattcctcaaagtcttctgtggtttggcttcagtgagggcaaaagaggggggactggagtgaaagtgaactctgcttttaaaatgttcgttttatctaaggtgtgcagggtgtgtggatagcaagtttgagtggtaagaaaaatcccagtccagggtctgagctctaactcttaaaactcttcagcttaacaaagtgacccacaggaacagacatgaacatctctacacagggcagggccaaaggtgttctcaggatcctgctagccaagggacaagtcctgattgagggtctagagctcagcagatttatggaggcagcatgcaccctgggcgcctgcccagactcctctctggggtttccattttatctctcaagcttttaagatgccaaaaggaaaagcctttaggaggacgctaaggataacttcgttattcttcagttctctgctcctcctccagctcctctttggtcatcatcttctcgtactggtttcccctcagcttcccggggctgtatttgaaggagaagccttctccgtcctcctcctcaggcccttccgatgatggccccttctcaccatccaagtcctgctcctcttcctgcctcgcctccaccgcctgctcctccgcctccgctggcgccgccgcgggatcccctggcccttcgggctcccccggtcccgcaggctccccgagctcccccagccccgcgggctctccaggctcctccggccccgcgggcgaggccgccggctcgggggcgcaggggcgggacggcgccggggccccggtggcctcggccgggggcgcgggttccgggggcgcgcgggcaggctccgggctcgcggccgccccacgccgcaccagtagccaggcgagcagaagggccagcgcggtggccagcgcaggcagcgcggccagcagctcggccggcgcctccatcgcgccgcggccgccgagtgccggccagctgcgaccccgagggatcccgccgcgccccgtcctttgttaatgaattttatgagttctttatatgttctgaatagaagttctttatcaaatatataattcgcagatattttctcccagtacatgggcttgtctttttatcttcttaacacttttttgaagaccagagtttttaattttgatagtttaatttataaaaatttgggccgggcacggtggctcacgcctgtaatcccatcatgttgggaggccgaggtgggtggataacgagggcaggagattgagaccattctgactaacacggtgaaaccccatctctactaaaaatacaaaaaatgagccgggcgtggtggcatctgcctgtagtcccagctactcaggaggctgaggcaggagaatcgcttgaacccgggaggcaaaggttgcagtgagccgagatcagccactgcactccagcctgggagacagaacaagtctccttctccaaaaaaaaaaaaaaaattaaaattaaaaaaaatatatatgtatatataaatttgtgttataaattatattttgatatgataattaagaaatctctcctaacccaatgtcacaaacatattctcttttcttccagaagttttataatttttaaatgtcgcatttttgtttgtgatccattttgaattgtgttttatatgtggtgcaatatatgggttatgcttagtttaacaaaatatgttttgcatgtggatatccagttactacagcaccacttgtttaaatcctgatggccctttatttcttgccttactgatctgactagaacctttaataaaatgttaatagaagtggtgaaatgagcattcctgtcttgtcctgatcgtagggggaaacattcattatctgaccatcaaacatgatattagctgtacatttgttatagatactctttatcaggttgaagaagttccctgctattcctactttgttgagactttttttttttatcagaagtggatcttggatttagtcaaacaccttttctgcatgtatcgagatgattatatgactcctttgttgtaataagatgatcttttttattccttgtaacaattctttgctctgaaattggttgatataatataggcgttcagctttcttttcattagtgctaatgtggtatatcttttactgtctacctatttggatctttatttaacctatttgaaataagtttcttgtaggcagcgtgtagttagattttgagatgttgtgttttgctttttttttttaaaatccagtcatagtctcagctttttaattcagatatttaagtaatttacatttcacaaaattattgaatgtcgttaagtttaaatctttcattttgctgtttgcttaataattttctcatttgttcttttgtcatttttttcctttctctgactcctttgagattaattggatattgtaatgattccattatatcccctttgttgaatttctagctataacttgttttgttagtttattttttgctttagggtttatagtatacatctttaacttaccatagtctaccttcaagtgatatactactttatttatagcatgtgaatgttataataatatactccatatatgctctctggacctttgtgctatatgttgaaaatccatgatttatgttcattatttttgtctaaatagttgtctttttttaattgtgatcatacatatgtaacataaagcttaccattttaatcatttttaagtgatcagttcaggtatgttcacatttttgtgcaaccatcactgccatctgtcagaactttttcatcgtcccaaactgaaactctgtacccattagaccataatacttcatcttccaccccctcatcccttgcagccagcattccactttctgtttgttacgaatctcactattcaaaggacctcacatatatggaatcattcaatatttgtcattttgtgactggcctagcataatgtcattaaggttcatccatgttgtagtatgtgtcagaattgtattcctttttatggttgaataatattccattgtatgtatgcataccatattttgtttgtccattcatctattgatgagcagttgggttgatttcaccttttggctattgtgaatattgctgctatgaacattggtgtagaaatatctgtttgaggatcgggtacagtggctcacgcctgtaaaccctgcactttgggaggccaaggtgggcagatcacctgaggtcaggagtttgagaccagcctgcccaacatggtgaaaccctgtctattctaaaaatacaaaagctagccatgcatggtgtcccacccctgtaattttagctcctcgggagcctaaggctggagaatcgcttgagcctgggaagtgggggttgcagtgagccaagactgcgccactgcactccagcctaggggatggagtgatactctgtctcaaaaaaaaaaaaaaatgtctttgagtctctgcttttagttcttttgggtatataggtagccctccttatccatgggttctgcatccatggattcaaccaacgtttacatctgtactgaacatgtacactttttcttgtcattattcccaaaacaatataatagctatttgaatagcatttacattgtattaggtattataagtaatctagagattatttaaagtgtatggaggatgggcattggttatatgcaaatactaggctattttacattagagacttggtgcgggggggtggggagcggtggggggaggtcctgaaaccactgccccaagggtactgagggatgactatactcagaagtgaagttgacagatcatttagtgtcttacttagttgggggtgttctaacaaattaccatagattgagtggcttaaataacagatattcatttctcatagttctggaggctggaagttggagatcagggtgccagtgtgattgggttctggttagggcctggttctgtgttgtagactgctggcttcttgttgtatcctcgcatagcagaaagaaagctaagagttttctggagaccctttgtaataagggcactaatctcattcatgaggcttccaccctggatgtcaacatatgaataggaaggagggggcacaaatattcagtccataataaaaattacttttttgagaaagtgtcatattgtttttcacagcgaatgattatcttttaaagagagttaaataagaaataatatttaatgatgtagttaacatttctggtgttcttctttttattgtatagatccatatttttatctggtatcattttcctcctgctggaaggataaaacatttttgtaagcaggtctgctgcccatttaaaaaattaagttatttttctttttatcattgagtcataagagttctttttatctgtggacacaagcctgctcatatgattttcagatattatctctcagtctatggcttatcttttcactttcttgagggcgacctttgaaaaggttttaattttgatgaagtccaatgaatcagtcttcttctcttttttgacttctgcttttgatatcatgctaagaaatgcttgtctaacccaagttcatgaggatctactcttgtttgcttcaagagttttattgttttatctcttatattgagttccgtgatccattttgtacatattttgaggtgggagtccaaatttatgcttctggatgtagatactcagttgtctcacaccatttgttgaaaagactattctttcctcatttaattgtcttggtccctttgttaaagatcaatggactattaaatgttaaaatttatttctgaaatttcaattctgttctcttgatctctgtgtcttttttttttttttttttttttttgagacagggtcttgctctgtcacccaggctggagtgcagtgccgtgatctcagctcactgcaacctctgtctcctgggctcaagcgatcctcccacctcaccctcctgagtagctgggaccacaggtgcatgccactatgcccggctaatttttctattttttgtacagacagggtttcactatgttgcccaggctggtctcaaactcctgacctcaagcaatctgccgacctcaagcaatccgcccacctctgcctcccaaagtgctgggattataggcatgtgccactgtgcctggcctctattcatattgttgtataatacatttaagatttttttctttatcactgattttgggttatgatattcattgatgtagttttcttcatgtttcttgtgctttggtttattgaacttcatgtgtccgaaggcctgttattttaatcacatttggacaaattttggtcactgtttcttaaatatttttttctattctcctaccacccttcccaggaatcccaaagatatttatattttttctgcttataattgtagatggctttatttttttccccaatcattttgccctgtgtttcatttttctgttgctacatcttcaagttcattctttttatttttattttttctgagacagggcctcacttctgtcacccaggctggagtacagtggcatgatcacagctcactgcagccttgacttcccaggcttaggcgatcctcccacctcagtctcccgactacagtcatgtgccaccactctcagctaattttttgtatttttagaagacagagggttttgccatgttgcccaggcagttcttgaactcctgggctccggtgatctgtccaccttggcctcccgaagtgctgggattataggcgtgagccaccgtgctcggccatttaatttttttgttaaatcttctattaaccccatctagtgtattttttattttgcattgttttttcttctggacaacttattgacagcctagagataaagttttgtcatgcctctctgaactcaccccctgctttatcctattgctagtggtacattgtcattttcatcccaagaagttttatttgggtcatttttatgttttccatgtgtctccttaactttttgacagttttaaaaacttctaaatgtctttgctaattttaacatctttgtcagtgctcagtttcagttgactgacttatctccttactgtgggccatattttttttgctgctttgtatgtctgatagtttttactagatgtttcacattgtgagtcttatctcgtgtgctggctactttttattcttagaaatattcttgatatttgttatgggatgcagttgaattacttggaaactgtttgattctttctagttttgcttttaacccttgctagttaagactggggcagtaccttgtttaggagtcattattttctactattgaggctagacctttctgtctcttctaattttgtgaattctgaaattttctagtttggctggtgggaacaggaactctttccagtgctgtgtgggaggtaggtgtactcttccctgtaatccttttgagtgattctttccccagaccatgcattgattcctcacacacatgcattgatcattattaagctgaatactcaaagaggaccctgtgaagatctctagggttttctctctttgcagctattttttctgtggtactctgtccagattacgagttgttttggtctcagtaatctcagctctgtcatctcaactcagagagtctactgtcctctgcctgggtttcttcccctctgcactgcagtccaaaaagtatctcaaggcagtaagctagggtaaggctcacctcatttgtttcccaaattttggagatcgttgttctttgttgcttgatcagggtcttacaaactattgtttcatagagttttgtctgttttttctttgctttaggtgggaatgtagatttagtttctgttactctatctgtcttggacataagcagatgtcccttttgtctacttttatttatttattttttgggagaggaggtcttgctatatcaacaggctggtctcgaactactcaaggaatcctcctgctccagtctcctgagtacctgggactacaggcatgagcccactgcaccttatttactttttaatgggaaaaatttgtgttggaatattctagatggaattctctctctactcagacgttagatcatattaagatagtgctgagattttaagaaaatctgttcaaattaaatagttaattgaaaccagattaacagaaagtactattcttagcattcagagatagtgaataaataagatgaggctgagatttatattgctttatggatacttaaaattgaatatgtaggacaggatttcttaaacaagatagcacaaataataaagggacgattgattcattttcatctaaaaacactaaaaaataaacagttaatatttgtggagcactcactgtgtgccgggtactcttctaagtactttaaatatattaggtcatgtaatctttacaactctttgcagtttggttattgtcacagtgctcatttttcagatgcagctgaggcatgaagcataaaaagcaaacagtgagctacggcttgggaaagttttatctaacatataattgacaaggtattagtcaattatgtgagctttgacaaatcaataagaaaaagatatccatttaaaaatgggcaaaagatacaaacattagtagaagcagaaatgtaccataaacatgtatatgctagtgagagtatacaaccctcttggaaaaacttttggcagaatctgttaacaatgaagatttgactaacctacaacccagcaaatcttctcctaattacattccctagagaacgtctcccacatggatactgggacattcataacagcattgcttataacagggtttgataatcttttctttaaagggctagatagtaaatattttaggctcatggaccatatgatatctgtcacaactactcattctgccattgtagtgctaaagcagccatatattacaaaaatgaatgggcctggccatgttccaataaaatttcactttaaaaaacagtcagctggtttgccgataggttgtagtttggagatccctagtttataatttcaggaaattgaaaatggcccaactatccatcagtaggagaatgtgtacataattgtacttaatagtggaagtttgtaaagtattgaaaaatgaataatcctcacatagttcatactaatgaaaaagcacatggaggaataattctatacgattgtttttatgtacaattttaagatacccaaaatgatactgcatgttatttgtgtatacttatgtagtaaaggtataaagaaatgcacgatcactaagatgagaatagcggtgacatctgaggatatggagtaaggatgcagttagtcagggaaaaggacacaggagcttcaacccagctgctttagtgatgttttatttcataggctgggtgtagtgaactattgtattattcattagacctttttgtatttcctaaatatttcataataaattttaaaagaaataaagtaaataacagtggttagaaaaaacatttgttcctactccaggtagttgtcacgtggctctttcttcctctctgctgctcacatacctggttcattggcctctcactcccagagaggcatctttctatcttaggccgaagacagatcagctttctaggtaaatgacccttttgctcagtccgctgccgaattggcttactataggttggtgcaaaattcactgcaaattttgctattgaaagtaatggcaaaaactgcaattacttttgcatcaacatagtatctacagtctgttgttttataagtatgcgtcaaatcctaatagttcccctttctctagcctctcatttgttatgccttttggatatacttactcttcctagagaaaggatctaaatttcttaatggagaccacacaggcaaaggattgcctttggcattttcatgtatgcctggctcacagaggcatcagaatgcctgcttggcatgtttgtgggtgagatagtgagtcaaaaataaaagctaaaactgcatttatttataaagagattgaagagttatttattgagcatcttttttgtgtgtgtttggtagtctttcctagtgtggagttctttcaattatttcagtacacttctctaaactttttgacttttctatttaagatgttcgatcaggtaacagatgtagtctgtggagcactgacctagatcctatgtgaagttacaaacaagtgaatgccaaacccttacagagtgtttgaattaatggagacttaattacatgatgaggagaagagttgtagcagagaatatgtagggcagctgaggtgtgctcctcagaggagggaggagagtctgctgtgagccagacgagcagggtggggttggagagaccagcagggcttgcaaggtatggtctaaactgtgaatgttttcttgcctaaagtaaaagatgtatttgttgattaatgaataattatgttagcatttggagagagaagatacttcaaagttgatattgatttccaacaagattaaaaatatgatatgtataacattgagatgtagatttaatttgtattcttttcataagagggaactgggaatgtccatttggtgagggtacttaagtcttaaaagtatgcttatttaaagacaaatacgtggtaacatttttaaagaaatgttggtatgtttagtaatataaagttgcctttggcttaagctaggcagaacaaataaaatgtgtaaggaacttagaatagaaagtacttgtagttacttggggatagggttgccagatttggcaaatgaaaatactggatgcccagttaaatttgaatttcagataagtaaccattaatttttagtataagtatgtcccaaatacagcctgggatgtacttagtaaaaatacttatttatctgaaattcaaatttaacttagtatcatgtatctggcaatcctatttgaggatgaagaacttcagtaatttataccaagaaggaagttaactagtcctaaaactagatgtgataatgtttaattttgagtgaataactgactgttgtaatggttttgaatagtcttaaactgttccattttgggcagggcctaaccagccatttgcagacagacagataaaatgttattatagttgtgttgacttaactttgaaccttgtaatgttgtgtcttgattaatcaaagtagcaggaaggagaggagatctcagatcatttccaataagagtaaaaacaaaattaactaaattgaggaataagtggatttcatgttcacataaatacatttatagttaatcactagattgctgtaatgcaggtatagttagaagcagttagattttggagattttggatatggtctgaaggtattccatatcttgattaatggtattgatagttactctgctgcctaaggcaaaacctgcaatcatattgtacttctccatttcccccaagtgtaattagtctccaagtattatactgtggagtgtgcttcaaatgtttcttctcatcattgcctctgcttatttcagccttcctataatcctgtctgtgtcctcctttgtccaatctcccttagtaaatcttcccaccaccagaaattctgtagttctttttaaaatgtggaatttattactctattcatttgtttgaatatccttaatgaggcctcagtcattttcagtttaagataaaaattatgttcttcaggccaaagtgtagtgactcaaggggatgggaaagagaagtccacctatacctttttggcatgatcaggatcatctgggagctttctaaaatgattggtatggtagtgtgtcattgttgctggtgaaggtggtcttatcacttagcttatactagggcagaaagaaggttgcagagtagtatcacagaatggcccctttggcccttttatgagttgttctagaatttctatccttcatgatttgtctctgtctacattcatcttttgctctgaccttctcatatctcaaagtagccatattatactctgtaagtcctcaagtttcccataccattctgctcatccattatattactttttgtagggtgttctctgtaaaggaaagccctttgcccccattgtgtattaatgaatttactactttctttctagactgcttaaatgatcccttaccctcctctttcccctggaagtcttctatggtgtgctagtcaggaaaggttgattatgtttcaggaataacctccaaatctcaatggtttaaaaccagaaagctttctttttcactcatactgtatgtctacatgggtcgtctgggtgctctgttccgtggtatcattactgtgggactcaagctgatacagcgctatcattgaacactgactccttaaaaagctttgattgaaagtgacatggccactctgcttacattttattggctgaagagggtcacatgttcatacctaacctcaagaggttagggaagtgcagtcgtactatgtgcctgagagagcggaaccagaaatatttcagggagagcagcaattagtgtctctagcctgattagtctctctacttcatatatctatgataatttgtaaacctctgtatctcactaaattgaaattataataaacgctgtagtaattcagaatttgatgcatttggtgattggctcaagacctctgaaattcctagacaactggctggacaaactaaccatagccatttcattaacctcacaataatgaaatccttgttttataagtttatatcagtgattttcaaccttggctgtactttagaataacttggggagctaaataaaaaaagattcctgagcctcaatccagagcaattaaatcagagtctctgagggtgggcccaggcatcagaattttttaagctctccttgtaattctgagctataaatacagttaagaacctctggcttacattcattgcttatttactttctggggaggcgctttgaaatagggccttgcttttattatattaccaagacttactctctttccttttattttgccactagaataataaactacaccaagttacaatcaagtattgatttttatatatactgtgtattttctgtctcctatattacattttaaggactaggaccacatctaactggtttgtcatatacccagtgcatgtcatactatctgccatccagtttcccaagtctattttttcttcctttttttcaaatagtcgtgcccacattcacccatttttttggattccctctcctctgtgtggtgctttctttttcttgtattgttcctttgtctttctcttctttcattagatgaggtaaataacatttgagaaataaagcaaaatgtaattatatttgaaaaatgtaaagcaagatacacacaaacaggaaggttatttgtattctgtgttaacacctccagggcccagcttttatgactgcttagtggctctaacagctgatcacagtagcatccacttaaccttcagctcctttgatcagtgatccagctaatcccagacttgaactctgtgtcttctcatccagtggtgtccattgcttggatgtcagataatcagctctttataattttattaaaagaatattttgttctgagaactgtatattaaagagaaaataatctggctttaagactatgagtcagatgtaaaatttatacaaattctataaactgaaaagatactctatatcataatagtgaaatcttgggtccttaagacttaatattttatgtggaaaaatatgtcatcttatccttcaaatattgtctttataactgtgtatttattttaggcatgtcagggaattccaaaatgatttatattcttaagtgctgaatatttttcataaagccaaaagtatggataaggaagagcatgtctactttaaagatgaccttgcttatttgaaaagtcacatcctcagaaaaacaaccattgaaatttaaacagtattcactcatgtttgactaattaggaatccacgctttagttagctcattttattgtttaaaaagctttgagtggtaatgtgttttatgtctctctgcctttcagtgtgtcatttttatcttcccagaatgccttttccctccctcccccttttcttacttggaaaaggtctatgtattccctaattcttagcataaaggaagattttacccaatagattgctgtcacttatgtgtgtgttccctatttatgcatctatttttgtacttattctatattgcagttatggttcttctctttcttccctgccttctactttgtaaacattttcagggcagggactttcctacttgtgtgtagctagtacatggtatgtgggctgtcaagtctagttgttgagtgaataaataaaaacgtagattatttgtatgtctctctgtgtgtaatatttcatacatggctttgcatattataatttagaagatgggctagttaatgaattatgaattatgggtgcttcccaaaataaccagttaatttattttttatttatttttacatgttttgtgatttaaatacataaataaatagtaccatagctgaacagtattttcaaaagggccactggcactataagaactctaaagccagttgcagtcttttgtggaacaattctgatacctcagtgttctgttatgagacgttcaggttctgcttgattctgggcccctctttccagttatgtttttgccaatcttaaatgtttatattttctggtttctgaagtttgaactgatctccgtgaatgatgctgtgtgtatgtgtgtcagatggtggggggttggtggagacagagtctcactcttgcccaggctagagtacagtggcactgtgttggcttactgcagcctccacttcccaggctcaaatgatcctcccacctgagccctccaagtggctgagactacagatttgagccaccacacctggctaatttttgtagttttttgtagagacggtttcgtcatgttgcccaggctgctgaatgatgtttttttataacaaaggtagtcgagcattgtgcttggtccttgttgcagtggagcacggtgattgttacccaaagtgggagacagccatttcctattctgatgagacagatttcatagatatctaaagtgattggtgctcatggtatatttcacacacacatagaaactttgtttttagtttttgtgggttgatagtgggtatatatatttatgaagtatacacacacattttttaaataggtgaaaattgtttcaaagtgagtaccaagggtggtcttaaagggaaagaaatgtcatagttaggcattgtgcactgggctgccagcccctatgttactttgatagggtctctttataaccagataatggtgtcatttccccctctcccctgctattacatcgcttcaccccactgcctgtttcttgctgcagtttttatattctcaaaatactggctgtagggccaccaaacttaggtgtgctatattggaggaactcagtaggcctaggaaaagaaacttttcagagaggcaggaaccgaatttgttaaataattagaaaatttcagaggaggtgggtgaggtaggaaagggatatagagtatggtataggaatatagtataattctcattgtttgacatccttgaaccattatatttcccattgttttcttgtctcttgctaatcaaatttttaataaagaaatatatcgttggttaaacttactcaagaacctaggtatatttcagcagtgggtgaaattatgtctttattgtcatgttggcaattatttattgatttattatgcaaggtacatagtgttaggtatgttttctaatgtttaattcttactctgatattatgagtttttactaaagtcagtactttcaggattactcagagatgaaagatgcagtatatgtatatttttatttgtagtatttgtaatattatataattgcattttattttaaatttctataatgcttaaaattggcaatattagtatttataaatgtagcatttgaaaagcaatgcatcattattttgacatttccattcttattttctttctttctttttgtctttctttttttcttttaaagaattaatgcaccatctggaaacctctgagatcatgccataaaaggaatttggacttttttggcaaccaatcatcagactatgctgtgattatgcaccttatcagaataataaaacataattggaaaggtgtattaactcatttatgttttaaaacacttttatattaaggattcttgtatagacattatgggaataaaaaatttctactgctgtatcccaaggttaagatgattaatgggacagttgttggatccgcaaacagaaatgtaaatggaaaccctatgtgattaaattgttctgagctatttctaaacactatctcctctatcttcttttcagtgttaaaataggcaaatacaaattagtttatatgtttttctgaggggagagttgcagtattacattgcaattaatttgctctactcttctcttctgaataatatagtcattgaaactgtcagccaaaggatttttttttggaacatttttttttaactctaaaaagtaacaagttttttaaattaattgaaagcaaacagctgaaatcatgcattgaaagggttaagtcgacatgaaagaattcatttccactttaatgacctagccttgctgggttaggacgatggggaacatgcttctgacttgtactcctattgccaattaacacctcctataacaggttgccttagctagtcattgaagctcatgcagtagaaatagtttacatgcagcttgtttttcacactagttgtttaatacaaaattaaagtattaaaaggttgtttcttaccttgctgggtaagagataaacagtacaatggtagttagttgtatgtgtttgaattcatttatgttgcatttttttaagggaatttttaattgaggaaactgaatgtagtggtttcatcagaatttttgattttatgataaaatttgttgagggttatattagataccataaaattaagaattattttccatcaactcaataaattatatgtttaggttttgttttaaaacatataatcaccttcatttgttcctaaagcctattttcttttttgttataaagcatatattttaacagacttttaaaaataatttttaaaacacaggactaaatatgcacttttaaatagccattataaaaataagccatatgtaatatttaaatattcaaactccttttttttttttttttacaaatttttgaaatgtttaatgtcatttcccgagataactttatatttttagatatttttggaatgttgcagttcagtgatgctatttattttacatttcttttaagtgacactttagttcatgtttaatcagcaggtattttaataacataataaaattggctaaataattgataccagttcacactaagagaaaggtggagtaatataactaatagtgttaacaaatttgttaaaaggcctgagtaggtaacactttgaggcattagtttttatgctgttataatggcaaatgccttttttttttttagcacttagtcaacaagggctacccatgtaaaagtcacaggtttttatactggatcagattttaatcttctaaatggaaaaaaaaaaatccacctcatgcctcagttaatttaaccacatttaaaatttgtaaacctggatgataatatctgtcttactaaatgtgtcacatcataactcattgtactgaggtttgtttgcctttgcagaattcataacaggttttatatcattggttgcttagattttcatgaatgaataaaggctggtcacactgcttgtgcctgtggctcagctttttaccctacagttctgttagatcactgacttataattttagtctgtttaaaggtatggattttccccctttttataacaaacttattttcaagagtcagaattacttaagtgatttcaaagtcgcttgtaggaatttagtattgaggatttatatagcaaaagtaattatttcagttccttgttttacaagggatatgtgcattttagtttcatattttttacagaagtatgtaactataaatcatattccaattttcaaatggtaatattcatttaagttttagcagcagactgtgaagttgcagaatattcagatgtttcttatttacttttctattgtcagtgatgtgtgtgcttattttatagtggcattgtatgaaagacgagactattttatgtagcttaagtacctctttagttatactggtgccttcgtttattctaataggtattattaaatgaccttgaagtttaagttccatcacattcaatctccaatcaatgacttcctgttcttttttttttttaatggtggtgaaacagttgttataaggtcaacaaagttaacttgaatagttcacatactgtataagctgataattttagaactatgctcttgattaagcaccagaaaaaagactttttttccattacttttttttatagtggtaacagcctaagccaattttaaaaattcaaaaagtatttggaggccaggttttcatttggtttatatcattatataatttttttaacctcactttacccagcatttccctgactttcttaaacataataatttctcaataaataaaacatgattgaagtgattgacactctgtaaatccaggtcttttttagtcctataaataggacatgtataatttgtcctcatgtgatcacttagtccattttagttgaatgtaaatacaaactagcaataaaatagttataacttaagtctaacttaagaaaatatgttaacagtttctacttgtgaaatctttagtttcttatttatgtctaggattggaaatatgagacataagggtaggggtaaagggacttggaaacttactgtgggtgagggataaaaaccgtgcgctgtctcctttccgctaggtagctcctcccaatcctgaaactttgtgtctctgcccatttctgcccattacaacctcattaatctgaccactcctactctacatttcccctcactgaaacccttgactcatacgtttttctccttaagttttttcatgtttaaagagcctggccgggcacggtggctcacgcctgtaatcccaacactttgggaggctgaggcgggtggatcatgagatcaggagtttgagaccagtctggccaacatggtgaaaccccgtctccaccaaagataccaaaaatacaggtgtggtggcatgtacctgtaatcccagctacttgggaggctgaggcaagagagtcacttcaatatctttatttgctcagggcatagccatctagcacatgaagtatcttgaaaacccttcgtatttgagacttctgtttctataaggaattagtgtcctatttttgttgtttattcagttctttttctggagatagggcctcgttgtccaggctggaatgtgcagtgacacaatcacagctcactacagccccagcctcctgagctgaagcaatccttccaccttaaccttctgagtagctgggaatacaggcacacaccaccatgcctggcaaatctttaaaaaaaaatttgtggagatgcggtcttactatgttgcccagggtggtcttcagctcctgggctcaagtgatcctccagctttggcctcccaaagtgctgggattataggtgtgagccactgtgcctggccctactcagttctttaaaatacattaatactaagaatataattttatatgcttatatatatgcatccataatttaattctttgaactggtaatatatttgagaactgtgcttgcctggtttttatttttctatcatttgtgtgctgtgatttttaaaaagtctcaaatgctttgtgtaacttagatttcccacagcttttaataaaaagttatttttttaaggcaaagattttttttttaattggacttggaaaaaggcatattttaattttcatattagtatctatacagtgtatagtgcattttgctctctatagcccactgtgcccatctagacttcaggaaatatggggagacactgaagtgttctctgttctcagtgagcatactaactacttttgaataggaaggacatctcaagttttctttccattttctttaataggaaatggctccaggtggcagaggattctaaaattataaacaatggaagtgaactaagctcccagaataaaagtagacttgggcatctgaaaatgggatggcgtactgtactggaaagtatattactagcgtcagaagttgcattttagctctgattgtgttacattttagccttgtgatatatgtcgatgtagatgtatatttgattacctcacaagcttctcgaagcttttgtttaaccacacagctaaagtggtagcacatgatgaatacttaagtattatttgtgtagtatgggattggtatctatcacacatttgaaaaaaataaacaaaaaacaaagatgtgtttttccagagcctgaaaaattccagattttctctgataggactatgtggctcatggaatgatttaagcttcaggttaaacaaagataaacagcttttttccaccccgtaacatatatatatgcatgtattttttttttttttttgagacaaggcctcactgtgtcccccagactggagtgcagtggcgagatcatgactcactgcagccttgacctgggctcaagtgatcctcccacctcagccacccaagtagctgggactacaggcatgtgtcactgtgcctggctgagcctttcatattgtttttttttttttttcacccgctctgtcactgaggctggagtgcagtggcatgattttggctcactgcaacctccacatcccgtgttcaagcgattctcctgcctcagcctccaagtagctgggattataggtacccgccaccatgcctggctaatttttgtattttcagtagagatggggtttcgccatgttggccaggctggttttgaactcctgacctcaggtgatccgcttgcctctgcctcccaaagtgctgggattacaggcatgagctactgtgcccagccctattctgggtagttgggattgcaagtacatgccaccacacctagctaattttttgtatttttagtagagacggggtttcaccgtgttagccaggatggtctccatctcctgacctcatgatccgcctgccttggcctcccaaagtgctaggattacaggcgtgagccaccacgcctggccttcgtatttatttcatcatgtatttctgatgtaattagtctctattattctttgcccatgtttccattatggttttagtatttttaatttgcttgtgtactgacttcttgtcataaatgggaaaactattttttcagggtgttttgttttaaagtctttaggtatttagaaatttagattatgttggcaattttatgttcctttatttgttcagttgagtttctacctaaaatgtgcttcttcacccagatcaaataggcattcaccaatatttttggcatagcatttgttacactttaattttttaaaaaaacatgtaactctttaatccatctgggtggtggtataacatgatataggaaaggaaatttagttttaaatgcttccagtactaagaaaaaatgaaaaattaaaatagaatatgttcaattctatggtgataactttgaaatctaaatgaaatgaaactttctgcaacactgtaatagttcatctagtctcaagatatagataacctgaatttatcaatacaactgaaaagattataacaattagccacagaacagcctcagagccaaatgttttaataatgaacacttccaaaattgaaaaacacggatagattttttttttcacatacatattattggaaaatagaaaatggaaaactttgtaattgggaaacttgtaaatttttcagtttgttttataactctaacataatgatatcaaaacctggcaaatttcacacacacaaaaatgccagaacaatctcacttatgagaaaaagaaaacataaatgaacaaatagtaaagaaaacatgaacaattaatctagaagtacaaagatgatttaatagtgggaaatattaatgtaatacaccactgaagaaaggtaaggtgagtgaaccagtggccattgtggcttcttttaaacaaaaaatgttggtatctcattgacaaattttgctcagtctttttgttttaattgttactcgtaagcagcatacacaagaatttccattttaaacccattatgagaggcttttatcttttaacaagggactttaatccatttatatgttttcataactaatatatttgatcttaccttatgttgcttggtatttttttcttctttcttgatttcctactgttgttttactgtcagtattgtgtttggtttttcttccccagtgacttagtaatgtgtacattgctttttaattttaattaaaaaaatttttttgagacagggtctcactctgttgcccaggctggagtgcagtggttaaccatggctcactgcagcctcagcctttcgggttcaagccatcttcccactcagcgtcctgagtagctgggattacatgctttttaatttttacagtggttaaagttgttcaaaaaactaatttatgtttccagaatagtaaagtcaacacttacatctgtattttcccctactataaaagatagagcatattgtatacttcatttctccctcctgcctatatagttacctggataatggtggattcggatcctgattatttacattatttatatctatatctttttaactgcattcagtggttgtaacagatttctttatatgacgactcttccattttttagcttttaatatttatttgaggagtgggatgctcaagtggatcttttattcaagaagctctttcagggaaaatatatggaatcctattttctgagcccttacacatttagtaatgtatttgtgggcctttggatgttttttaaaaattgagtataaaattctttactttcagttttttacctaaaactttgaagatttgcttcattgttttctgccatctaatgttgcaaataaatccaaagtcaacctgtgttgcatttttttcccagcaggctgtttggtttctctactcgtatggttttagacattttactttatgtaattgagatttagctaagatttctcaagatacagttttttattcattgattattgcctcacatatgatggtcccaaaggtgaacttttttttaaattcaagaaaattttcttcagctttgcctttgtttattgtttctgtttattttagccttagaaacaactctattttttagctttgagctcttgtctgtcctgtaattcaggtgtcctcatatgagtctgtgaccatagaaaccaggccacacagcaagaggtgagcagcaggcaagtgagcattactgcctgagctccacctcctgtcagatcagtggcggcattatattctcataggagcacaaacagtattttgaacacctatgtgagggatctaggttgcatgctccatctataatgcctgatgatctgaggtgaaacagtttcatctcaaaaccatcctccctgccccaaaactcgaaaaatggtcttccatgaaactggtccctggcaccaaagaggttggggactgctgctctaattttattatatttctaaaagttttcatctctaactttttactgtacattttgggacatctagaaatttatattgtatatcactgaattaaatttgttataatacttttacccttgtttctcctagtgtgattttaattctaaattatttttcatctttttatcttggtctgtcctccagctttctgtttcaaagataaggaacttctgttttactgatgtcaaatagttttctaaaattttgttcatgattcctatatttaggtgactttctttttgaatcaccagaatactgccccccaggagtgtttgccaaaagataatgtatgtagatggtccacagccccacatttttctcatcttgggagctaattgggtcatctttgatctgtagctgtgaaatgggaaaagttcccttgtccccttcacagggcattcgattgggatgtggcctgcttcttcagtgccccactgctcacacctctaggggagcatacagacaggcaggctttggggctctgaccccacagcagtgtctaggattgagtgtttacagctgaggccccagtgggtgtgtgttatagggtgctcttttagtttagccatccataggtggcttgtgttagacagctcaattagaccccctgccttactgcaaggacagaggcctttctgtatctgggggttcttgccttggtgtactggaagaatcagatcacacgtgggcttggagatgagtgcaaggttttattgagtgaaagtagctcttagcagatgggggagccagaagggagatggttttccactggagtcaggacgctgtcctccaactgccctggccagactctgcttcattctgctggttgatagcctgcctgcgtgctggtttgctcataccccagtggtttctctccacgtccagccgtttgtgtgtccctctgctgatgtgctcctctctcatgttcagctgccagtatcatcttctgcttatgtgttctgttcctctcaatgtccagccacttgtgtctttgcctgctagggtctgggagttttaatagacacagcatgggggagtggcaggccagggtggtcttggaaatgcaacatttggggaggaaaacaaaaataccttcacctaggtccatgagcgcaggcctggtggtggtgccttagccaggggccacaccctcctctacccagccctgccttggcccccctcccctcatatcagctgttcatgttcttacatacctctctgagctcagtttcgagtctttaatggggttttcttctgttgcctggtttttgctattctgaacaggtgagcatgtaggaaaacaacagccttagtcactgctggctgaggtctttagtatctgtcccattgatggtgtattatatgcgatttctctctctctctggcagtatttcactggtaccaaccttctctagttcttgcccacagtagtgaaaggggcagcagtatcactggctgctgttttaaaaacagcactcatggctgggtgcagtcgctcacgcctgtaatgctagcactttgggagactaaggcgggtggattgcttgagctcaggagttcgagaccagcctgggcaacacagggaaaccccatccctactaaaatacaaaaaatcagcctggcgtggtgacatgccccttgtaatcccagcacctcaggaggctgagacaggaagagacgctggaacccaggaggcagtggttgcagtgagccaagatcgcgccattgcactccagcctgggtgacagagcgagactccgtctaaaaaaaaccaaaaataaaacagcactcatacaataaacagctgcatagtcttctcttagtacatggctttcttgttagtatgtttctgaatcagaagaaaatccattgtgagttagtatgtttctgaatcagaagaaaggccactgacatgtggcttgcttcctctctctcgaggtaactctagttggtatttttcttttctgttccattggcttgcagtagtaccttaatttattcattcattctttcaatcagtacttattaagttcttactatggcccaggcacttttctaagtactggttatatatataatattgaagaaaatagtgtttcttccttctttggtggcagaaatagtttctggattctttcagtaatgcattttggtgatggtttgatgttttatttccctttttttctaaaaaaaaatattttcaggcaagttgagaaaggctgtgtcaagataccagtttaacttctttctccatatgcaatgtttaagattgctctggattcaggaataattttatgaatacagtgttcgttaacctatttttctacttttattttaaattggcaaataattatatatattggtggggggtgatgttttgataaatatatatgttatggagtgatcacataaggctaacatatccatcacctcaatatttatcatttctttgtgctgagaacatttaaagtcgtcttttaactattttgaaatatacattattattaactgtagtcaccaggctatgcagtagatcaccagaatcaattccttctgtttaactgaaaccttattattatcctaaccttttaaggttactactacttcccccaaacctctcatcacaaccaatttattgttgtcctcaccttttccttaatctttcttaactttctaagtgaaatgagtaaaattatcataccactaaaattaggtttatatgatgacttcagcaagatgctttggcctgttattactttactttagcagagttttcattctgaaagagatcttagctatttgaaaaataagcaataaaactgcattaggtgataatagatgaagaatttggtcagtttccaactttattgcctggcatttatggtgaaaattaaatttgagggacttgatttttcccaccactttgaacaaaagtaaataaaaacaaaattattttatttagagaaaacttattctagaaccttttatacttaatgcttccagtaaatatatgaacttttaaaacaatacaaagtaatagaatttaacacacacacacacacacacacacacacacacacaaaagcacaaagtacacatagacctatatgtatggaatgtaaagcaattgtttacttttagtatgtaaaagtataaatgggagagagaacatggcttacaatttggataaggtaacatgttgtttacctaatttgtaatagagttattgtcagggaaagggaactttaagcaaaacacgacctggcaattataagtcatatctcattataatttcccagattgtccaatattaaaaaacaagaagctttttaggtgcactaattgtggggcagaatcacatttataagattataggcatcttgagggtaagaactatatgtcagttaccttgtgcaggtgaatgttatagtcaagagaagtttgcttcctttcaggaagaagatagaatccttaaaggagaaacatagtgtcttccttagtaatacttgttttaaaggtagtggttaggattttggaagtattttcacgtcagctatacctgtctcaactggtttgttcacacctggggcaattgtgttaaatttgttgttgtatagggggaggggaacagcttcattaggtgacatgcagaggatgttgttcacagctctttcacccagggattagaagtcttctttccccttctcctccactgttgtgatgaatttgcagaggaatcccatagccttaatctattaatactcaaagaatttgctgtttgtgttgatgctttagttaattgtgctagtccaacagcatttcacatatacacactgtggtaacaaatgtggctaattggtacattatagccatgttgtagccaaggtagattggcattgccgaaagacttaaactttatgtccattagacccttggcttagtattaagttttacctgttttctacaggtttgatatttgcaaatgtgttttgattatgtcatagccaaataaaaggatacttgacatgttttgcaaaactattttaaaaatatcaagtttataccacatgtaacttgaattttaaactcataaactctgtgtttgttttaataataattgatgtatttgtttctaggggccacctacagatgctcctgcagtggacacagcagaacaagtctatatctcttccctggcactgttaaaagtaggtaatgaatgtagttacttgctttagagaactctgttgctttcactgtatcttttactttggaatatttgtcaccttaatcctctcagacataaataagctattgttttaggtacatttataaaaggagtttttattttcactggaacaaaatttggtttttgttttataaagaagaaccagagacctcaacgaaatttgctttgtgtccacatctcttcctttctacagatgttaaaacatggccgtgctggagttccaatggaagttatgggtttgatgcttggagaatttgttgatgattataccgtcagagtgattgatgtgtttgctatgccacagtcaggaacagtgagtacttttatggttgcctgctgcaagtaaatgtgtttcttttcatttttcttttcctatgcaaactaactctcatcatattacattttctctttccagtaggaaaaattaatcataagtttgatagaaatttttagattgtattgaattaaatcattaatctttaaaacgcagcataacttcttataggtctacaaactgaatgatgctaatgctaaatttcttttctcagtccttcggcttaaactggtgtaaaatactggatttaaaagttacttaccctataatagcagagtgttagtttgattttgaaccaagtgttcaaaagatttgagattctcttaatttagattttcaactcacatatactggttcttatgtcttgttcccattgttttgaaatatgtcatttaaaaaatgttctatatatggtgatgaatgactttttaagcttttcttatttaaaatgttaagttaaagcaaaacaaaacaatagcaaacctgaatatttttttcccaggcatggtattttgtttatatgcaccgtactccatacaaattacctgtatagaatacattattctttctagagatgtttgttttgttttgcctttttgtttgatgcattagacttgtgttgatagatgtgcattttgactgaaagaaaatagccaaaaaacaataaccattccatctaccttccaaaaaaagcacatatatccttctcacctgtttgcttagaaaaatatgcatgtatttttccaagcgatatttcttctttgctaggcaatatttctcttactgagccttgtaaaagaaggattaaagaaattgttgttataaagctgttagttctattcgaagttctgtaagtttactttgataaggtagatgctggagaacaaattacaattttaagtactgtaatatatatagtatgtatattaaaaataagcatttaaaatagaatatttgctacagaatgcaatatatttaaaataatgtaaagttttctctaaatagatgaatttgttgaggtaaactaatttggatctactgattttatccatcttgatatccattatatttattttatacatttggaaatagagaaacactctacatgttaaccaaaggtttagatttaaatcttagactatttattacttgtatctgtctttttatattaggctacatgaaacacataaaactaacttatatatgttatgggtacttatgtagatacccattataatacattgttcttaggctttaatatcattacttccatgtaaatgcttgtttgacaatataaaataaaagattttgatccctatattcactctaattctattttctagtgtcatagaattagaaagtttttcttctgaccccagagtcagtaaactttttctataaagacatatgtctctgttgcatattcttcttcttttttaagacagtccttttaaagtatatatatgaaaagaaagaaaaaaaccgaaaacattcttagcctataagcagcagattgcatacccctgttcttgaggatgtactctctgttggaattcaatatgcatactgtttgttttggtgggaaggaagtgcttatgttaactagtttctttaagtacattagatttagattcctgaggttagaagaaagccttgggagctataaagacagtactctatcgccagagagatgatctgaaccttttaattcttcctgttcaaatatcttattttggttgaactagcaaaataatgctgtatgtaagagacttgaggctgtttcattatgatagctgaatatttgtagaactttggatgaggctcattttagtcatcagttatgataggatggcattaggaagtatgcttgcctaaataggtctaaccaatagttatggttggttcaattatttcgtatttctggtaaacatatacacagcaatggccatatactcttaaagaatcctgaaagtgggcttaactcgatcgccaacagcagtttggtagttggcaattttagaagcttgattggtatgaggtttataattgaatgacttgagtaggtatcaaatgtaggtatcaaaacctataaaatgattttggcaaccccaaataatatacatagggaagctttttttccaaatttacaaaaattaataatttttctttctttctaaatcagggtgtcagtgtggaggcagttgatccagtgttccaagctaaaatgttggatatgttgaagcagacaggaaggtaagcattttaaatgatcagttaaagaaataatgggaaatatttatagaaacatacctcaaagttatagatgtttatcaatgtcatttctagaaaaagtggttatgtaattgacataaaagtatctgtaaatatcagtgccatgcaccacctgtctagtatatcttccctttagaaccagagaaatttgcccatcagagaactgcctcatgttaaaattcttgactgtcacatagtaagcttgggctgtagcttccctctgtttagcatatggagttactgtctagtcacttataattgaaagagcttgtatgttccatgtatttgagagttgcaactgaatgagattatgaatatttaattatgtttgtaggcatagttttaaagacagagaaagtataatccaaatattctaaagttttttcctcagaccaaatctctcaatagttgtcattctcttgctcaaattcttctgctgtggaaacaacttcaaaattaatgttagcaaaaggctcagcagctgagcagaacagtgcaaattggtttttgactgagttcctagttctactgctggtttaattgatatttaatcctttcacaacagtggatcctggtgtccattgttaaaaatgtactctgtgcctggaaaatccaactcccagagctaaggagttaaagagtagatatttacttgaatgctgaaagggtaaaaactggctctgagaaactgtggtaacaaggtgaaaaactgaaagccttatctaccactgctaatgtgcatctcttaatgatagcactcctttgtcacacatattcatttccatgttttctggataatatggtgtacaatttcagggtttctaatggtgctttttcacacctgtgtgtttttcatctcttcttaatttataccccgttagtgtgttgtttcttttcatatcataaatgtattacttgttctgttctgagcatctgaatgccctctttgtttcaggccggagatggttgttggttggtatcacagtcaccctggctttggttgttggctttctggtgtggatatcaacactcagcagagctttgaagccttgtcggagagagctgtggcagtggttgtggatcccattcagagtgtaaaaggaaaggtagagtagattctatctttattgccatctactgccacattctgtttacagatacattaaataaaaatcaattttgttcaaagcaggattcttaattacacagaaagctgctgtctgtttacttaaaaaacaaaaaaactgtacaagttgataactgtgtcttggtattattagcaatttatttagagatttcttctttaatcacttattgtgtaattttcctgaatatttatctttaaattttttgaatttcataaaattaggaaagttaaaccatactcaaagcctgctataaacattttattaatatttaaataaacattgctttacctttattttcaaatgatgaatttggaattggcacaacattttaaaaatctatttaaagggcattgttttgcagacattatgcaggacatattctggaggtgtgttttccaaatattttagacaatgaaaacttgcccaaagacttggtatcaaccattcacgtttttggagtgaggacgcaaatgaatgattaaatatgctaaataattctgaaaacagattaacttgcaaagcatattgggttatagttctttgttgaaaccccttttgttcttgtttagttctctttctctttttttgttcattcattctttcttttttttttttatttctttctttctagccccatatgccattttcctatttcctgcctcatgacagcagggagcagctctattatcaccttcacagagctgtctgcaaatgtgagaggcaattcgattttgctcaaccacagggagagtggattagaaaaactacagacatacagaaattggctaggtggttactgctttaaaatactgctgaggtgtcttgtttgagcatgtacttccattgtagtgtagaataattgttaaaataaaatcacaatatatttatgcaatcctttttatgcaggttttacaaataatttttagagtacttagaaataaatattagcttgttatctatcagacctggagtttgatagtagtgcagattacatttatatctgctcaccagcagaaaaactaaacatggctgttaaaatacggagtttttatctgtcataaatttgaagttgaatgttttctgacatcatgtcattatcatgtataaaaattgaggtcttctctaaatcatgatcctattaggtgtgatttagcttttcagaggcaaaaactatccacaaaaacagtaatagaaactgatatactagaccattcagaatggatagcttctgattcttgctatatgcctatatttcaatttatttacttttttttaactatatgtgttgttactcaacatatagataaaagaggttgaaaaatccttgattgttattagctttatgaattatatttgatgcctcttaagtttaattctctattttaaggtacctttttagtaactcgtaagtaattcatttaagtaatgattactgttttacaaatataacaattatctaataaagtcccctaccacaatatttacaagtaataattaaagcttaattttaaatataattagaattctattttgtagtattagttcaacttaggttttatgatatcttgactcatgtgatggtggctactttgaaaaaggaaagtataaacataaacacaatgaaagaatgcattctcaaaatagagtaaataaatgtaaatgtaaataaatgagtatgtattttatttttggttatccttttgtaatgtttaaaatggcaattttagtttccaaacctagtttaagtattgtaaaatattggaattttcattatttctaattaattgtaatttatattaaaatgatgaatttcatttaaaaatatgtatgtgtcacgtcttaatgttaaatttagtttttaaaaaataatatatctaaaatttatgaaatcatatgtatcactgtctacttttgtatgttaggaagaaatctttttgaaaaaatttagtgtaaatatctatcattgatgatttgtatcacttgttggacctaatgtctagattcatactattatatctcttgaaataaggatccagttctttgtcagtaatgcaacttcatctttaaggagtcagagtttgattgtaatttatggttctttcagtgtcaagtcctctcatctctatgaatcagattaaatgctagtaaatccttagttagtgttttagttaaatcatgatacttaggaatataaacttataaaaatgaagaatagtataagagtctccctctcccttttcctgcgtgtgatttatcaaagctgtcaaaatatttagtaaggcaatgattagatcaagaattaaaatgacattttatatataaatgatttaagttgggtctctgttcgctttttataaaaccactttcttgaacattttgtatatttccatttttataaattccaatatttctgtctttgagaaattagataagcctggattctttcttggtaatctcaattcattcacaatagtttgattttcttttatgatgacttgattatatttttattgaataattgctgtgagccaggtattgtgaataaccatttcaacttatctcatttattctttgttataatcctaaagataggccctgttaccattacatgttattagtggttaaaaaaaaaaattagggccaatgagattgctttgccaaagtcagaccatgagttagcagcagaacaaagatatgaatccagttctgtaaaatttcagggctcaggcttttttaatggctctttaattccttagtattaaaccactatgaatgatgtaatcagagtaactgcagaatgcaaaatgaataccagaggtcattgtgaggccattccttaagttactgtggataggtgtcactctcttcagcataagtcaggggaaagagctgtacatttcctctaagttttccatagttttctgtaggtattatgtattatatattaattgattttttaaaatgtgttgttcaattaattttaaaaaacaatttagacagacttattcctgttgacttttgtgacatccctaggagtaaacattgaaatcaacataaataatgaaatacactatatgataaagaatctgtaaccctctgcatattgtacagtactataaatgttttaaaatgatacaggtgaaaatcaatggtaattgcattcataatttaaatggagagtaagctcacagaagttaccagtgagttctgctctaatcagtgaaatagtttataaggtccgcttgcagcatttagttcatttgtaaaatatacatatttacatattttaaactttagttctcaagtggcacagtggggacctcctgctgaatgttgtattatcttgtatactcagcccataaccagatccagcagcaaatttagaagttaattcaacttgtaatgtgactatacttctttcttgaggcaaaaagaatggtcactttgggcaaaatcataaaactagcatacaacttaattaggatattgtaatatatttattaaaaagcattactgctttagagaactcattttccttgatgggttcctgttagtaaaatgctcagttattaccagctaactaactcctaacaatcattgtgtctgttctctgttttgaaaacataaaaaaaggaatgactaattatgtccaaatgtgtcttccactggttaggttttcttgaagcatttttatttaatctgatcaaaacactcaatggactttaaaaaatgtgatgtttatctaactgcaggtcagcttatctgcaggtatttcttaagtgtacctgatctgtatgctaatgattctaagatgcaaaatgaattttaaaaaatggtctttgtgttctttgagaagataaattatatacatttagtgttagtagtgagcaagatcttattctgccaattatatactgataacctacattgcatactgatacaaaatatactgaaattgcttgtttctgtaagtattaagttggttgctagagacagaaataattcaacaaatacttattcagaattttgtatatgccagtatacaataaagtattacttgtataacaaacacagtaaatgcaaattaaaattagaacaagggagaaatcagttgtaggttgcacaaagtagataaagcttgggctgagctttgaggggtaggcaggacatcactgagaaaagaagagcttgtacctcatgggaagaatgtagaaacaatatcattccaagtggtacttacctctttgttcattcttttttccacagatattagaatgtaaaatgagtgctttgattggttttaatttgtttaaacaactagcattttacaaaagatggggctttggagaataaatacaaatacaggaagaaagttagggaatgtggccaggtaccatgtcttcacatctgtaatcccagcactttgggaggtcaaagtgagtggatcgctagagcccaggagtttgagacgagcctgtgcgacatgatgaaactctgtctctaatttttaaaaaaattaaaataaaaagttagtgaatgaatgctgtaagagcataccctttattttcagatatctagaaggtcgtgtcttttctttcaggggtgggtagcaaatattttacttttccaagaaattttatattagaaagttttaagatggtgaaggtttttaagtactcagtttactcaaatagtagtcttcttttgagcttcttattttatatatctatgtatatatatacatatatatatatatactctctctcatatagagagagagggcatagagtaataaagaacacagacttaggggtcaggcctgcattaaaatcccatttttatctcctctttacagtgtgaccttgaacaagccttacctaattttcttgagcttcagatttttcatctatataacaggaatcttagtacctatttcatagcattatgactatcatgaggtaatatatgtagagattagagtacacatgtcatattaggaggtgtgcaataaatgatactttattctgaagattaacataattcatacttaaaaggatcaagaactagaatattaaaaaaatagaatgtgaatgtttctgcaagttttgataagaacaagcccataaattaatctctaatttgctacatttaggaatatggtaatgactacaaaagaaatgaagacttcccttcttatattttgtgcatgctaactaatctaggaatactcttctgattggcctacttttatttagcacttaccattttctaagatattttccttgggcatgctgatgaaaaggaagtgaatatattactttgaaacttgggcctatgaggtgattaatgtattgcacttaaccattttgtattttattcatctgtctgtgttgtcttccccacaagactgagacttctttgaggagagataccaattcatatcttggaattcagtgcgttgcaatagttttttaataaatgtttataaaataaaatcgaggaatgaatttgcatcagtgttcagccactaccaaatctattttttttagtttttagcatatccaaaaaactgcagttaattttgtgacatttattaattttttatatgtcagcatagagtcgtttattaaatgactggaacgtgtgattgacaaggtcagttagccagtttactcatggacattatccttgatcaatttgaaccctgtaaaattagagctagagttcaagtttaatagtcatttgtctactaaaagtaggaaaagatatttagcatagctgctatatttataagataattttttgatcagtatcccacgactatcagctagggctgggtagtcctaatcataaattatacacacctcttttctttgtctagttttccaggtggaaagagaaaaataggaaatcgaatacataaagaaatctatttccattcctgacatagctctatgagcatacccttccaaggtattcttggaacaagttttgttactgtattatcttttgtttgcttcctgtctttcactcttattatcagtttgaagttttataacactctcagatcttgtgaggacagctaagaaaatattataggtactaatttgcctatactatttatgatagaataacatgtaatagtttatcacatttatttagctgatataagaaattgtctgctaggaatgtagaaataattttacttttaaaattctaagagcataagtcgtatatagaggtaagagttcctatggagttcttttaacctagagcttctatattaataatataatctctgatctaatttgttatgctttactacttgctgtgcattttgaatgatgtaaatgtgcttcaaattagtttgaatccaactgtttcagtaaaaatacatcattcattacctgtaagaatattatttattgactctcacttcttgaatgcttttctctctgtagtcatctaattatccctggtcattggttcaacagacacttgttgatcactactttgtgccaagagtacattggaattatagagaagaatacgatctactccctgtccttaatgccagttttgtaccagcaagtggaaacgtggaaactatgactttgattgagaggcgttttcagagcccatatattttaatttttaaagatcacattctagatgtgacattagccattgttatttgtgaggatatttctggacctgggacttagttttgtcaggtttaatgtcttcttgtcattgtaattttctaaagagggtaaaaatgaagtggtaaattttcttcagtcataattgatccctcagttgtgatttttaggctactagtaagctgattaatagatgtttacagccacttttcactttccatatagctttaccatatgcagttttaaatccaaattaaatacatgtcagtgctctatgagtttctcagtttagcatgtcacaaaaaagtatttcatgaactcagaactgagcagtgataagtaaagactatattgttaacaagctactgattagattttgtttatagataatggatatttttcttttcctttaaggaaaaataaacataagtggtaaaaatttctatagcatagtaaccaaaagtgctctttttttttgaggttttcatttcaatagatatttattttgcactgtattttgtgtgccacttactctgttacagaatggatattcagtgacgaatgagacacaaaccttgctgttgagtataactgaacctagtagtagtcctttcttggttttgtgtcaggacagctattataacaaacagctttatgatgaagagtactggctttggcatgctgtataggtacagatcatagtgataacatttactggttgtgtcatttcatttaattgatttaaattctctacactgcagtttcctcatccataaattgataatattaatacctacacttgtttgttgagaggattagcaagataatttctatatagtatttaattgataagcaaaataaaaatacacaaagtgatacacagcaaagtaattggcctttacatatttttcctactaaaatgcctttgcctattgagagacagtagtccagtggatatactttgtatttttgtttgaatgtggtgttacagcacaagcaatgtatataggtcctttattctcatccacatgctctactgccatgctaacaaagttgagcccatctttgttctctagggccctttattgctttgctttatatggaattggcaacaggcaaacgagttgttttaatttttccactagaaagggatctgaagtcactggttccattttatgtaggctgagtagccactagatagaattgacactcttaagttgatatcagactagtgacccataggtgatagtctcttgtagcttattagtagtgccctgaggagttcaattttaagctcactgtttatttgtcacttgtgagtgtagaaacaccgatcatgcaggagtagtatcaagattctaggcatattcagtcatttttaaaagagagataataaccttcagtacaactatacactttcttattgtaattaggaatttccctaaggaaatatatcttaaagcgtcactctctaatttcctattttttatgtgtcaggtgtctcttgatgtaaaatttatagttataacttgatttttagggtaacttttttccaattttaacactcttcatgatagcagtactctgctttgttaactgtatcagtttgggtcttctgtggatcagatgccaaaatgaaattagacatgcaagagatttattgggggagacacccatgttggagaaaggggagagccttcagacagcagtgaagggttgaccatgcaaaggagaaagtgaaggtagattgggtagaagaaccacagactgcagctagtgctcagaaaatttcagccaggctgctggggagtccttgagccaaaattagcctttagaggaatcccttatttggcaggaatggctaggttctagtaccactgctgtgttcagttgttggcagggagctgcccaggagaagtatgacctggtgtgaatgcccagtagagccaaaggtgtaaaagctggaggttgtgagtcagtcatgcgctccacagcaggttctgttgaaagatctgagctgggcaactccatcagtgccacagttagtaacactgaaaactacagtggcagaaacatatatattattttattaccaagtctatgaggcatcgtcattcatgagcaaatggagaaattgaagggttaaataacttgttagaggtcccttagctagtaagtgatagacccagaattctaacttaggcaggattgactccagagtgcctcaagcatttaaacctctacaccatactgactacatgcatatgttgaaaagttttctgtgaaactttatttttattataacttaagtaaattcttttcccagtgtttcatgaatctaaaaatgtctaattaccttttaccatactagtttctaaagatcgatttgttttcattaaagcatatacgttcaaaacttgtggatttactctttgaattttgatgcatgtcttcacttgtcaaaaaaagtaaattatgcaagttacaccccatcccccttttctcccaatatactgaagttgtactacagatctttagctacagtaagcaattctccgaggatgaagaaagaaaatgtacatacacataggaatttcttttccagagctaaaattgacattttataaataatttccgtgttgcaaacttgagactaagaaatcacagcaattcagtgatatgcatttggcatgagtcagttttagttcttagtgattttcattggaaatggcataaaaagtaagatttctctgaattttttatgctgtgggcttacaagagacataagatgtttttctcttatagatgtctggcagtgcatggcagcagaagtaacgaaatggtcacaaaccccagcagtacttcccaggtcacatgcactcttaatttttaaagaatctagaaacaacctaagcagttgataacaggtcatttctaggtgataaagagtattggatatgggttaagtgttgcctttctttccacacctttcatttttataatcatttagagatttactttatatagtgatggttttatgttttaaaatatgtaatctaactagtaactgaatttttactttttttctttttagtgtttgacattgattttgaggtcttaaaatttttttcaagattttaaaaattatttcagttcgtcacttatgtttaccccatatatgatgaactgaataatttttattatatataatatataggtatacatatataatacatacattatatatatagtgagctgacttgaggttatggaagattctgattgtttcatttttaagctcaagaaaatgaatgcatcataaattcttaaaacattacttctactctgtgtagatacccatagtcactgactgtaatataagtgcaactggaccaaaggcaactactgaaaagagagagagaaaaaaattacagctactgccagaagtgtttgtgtattttttttaaaacagctttgtattaaactaatttgaagagctttgcttaaaaatagcttccttcggatgtaaaaattgggaactatagattggtgctttacaaatttagtctagtctttcagtgacctagcagttgatatgaaaacacaaattttaaaataaatagcatattggatgaactgtattctactcatgaaagaagccaaaaaattatggtttaaactgagttttaagtaataaaccagattcgtcattaaaatgaaatgatagatccttgacccttgggcatgcttggaataaatacggaactcagtattgtttttaaaactattttgcttttataatctaagacagatgtacaaaaaacatgcagtttttattttgtattggcagcttccaaatatttagtatctatttccaagagttgcaattagtaaagcaaccatggtactgaaatctgcacatcccacaagctaattatatttgcaaggtcagagtgaatacatattttcagaaaaataaagggttatataaatatgtgtcttctacttggctgttatatcacagtttgttgatctggagtataatgtgtacaattcacaaatttgtctgataacagaaagtggtgtgtgattgtgtttattttactaaccagtatattcacagcaatcacttccaaatatctctccagtaaagatgtgttaattacaaaacagacaaggtcttctattatattaaagctactaacaagaagacagcaggaatcacacatgtaaatagcatcatcaacccctattttagtcctctgttttgatctgtgagttgcgcatagaccaaaggtgctattaaagactgagtgtatgaaataggcagcattatatgaacaaaatttattcaacaagaaaacagacctttaacatgaatttaacaagcctgagaaattataaactatcatatgctgcagattcatgcagtgataataaacaaaaaaggaaagtaagaggtttccctaagctagccaaactgctaatggttttgttataagctgtctactgttgcagtgacctctgaaaagtctcaaggcacttgtaccagaaaaaattaaatggtcaggcgggtgaatagagattcaatgtattgtgtaggccttcagcatggaaaggaatttttcaaagtctagcatcatattcctgaaaatattcttcatactttagctcagaggttttcgttattatatattaaggagatagtttttgtgtaaagttttttggttaagttactgtttgagtttataagatataaactgaactaatttaatgtctatatacttcaaaatgaactgtttagaaaattcagagagctcaaaaaaatggattatttcccctaccaacccatacattaattaattcttgggagttctttgttcagtgtgttatatctaagatttctgttcttaaccatggagtgaccattttgctgtcattctattgcatcatgctgtaaatacacaaacatggagaaacgctttcagcttatacacaccatcgagtgctcactagggcttttttttttttaatcttacggtggcataattaacaccttcttcacccattgctcattagcgcactggacattaatgagtctattttgataggttgctctaaaggataaatccacttattttcacagtgcaaaaagcaattataaaattataccaaaattaaaatgtagactatattgccatgtttatattttattgcatactaaatctaattttggtctgcaggttgttgaacatgttagtttccttaagacagttgctatagtgatggcagcaaattcctttaatcttagtgtaaagtagtcattttctataggccatcattgctactcaggaattgtcaatgaaagcatctcattttattaagttcttgaatttttctcttagtttcttaagaaaatttaaaaaatttgtttttaacagatcatgatatctactgaactagtattttcatttcctttttatgaagtttcacacctgcttataatatttcagagaaataatatagacttctacaagtaaaatagctgtctgctattttagtttcaaagcattcagtataaaaaagtatataggaattttgttgtgatatataatgaaattttcataattttgtagtagctttttctccctctcacaaatgaatttactgaaatcttgaaatgggccaaaatgatgctttgctcctaaatatttactgttaacagttagggtggcaattcttaattttctatttaagttatatacctatcttggaaaatggccaccttcttcctcctttgccaacattttaactttatcttattttatgttcttttttagtatgagtgtgaggaaattttacttctatatttttaacaattgtttgaagttatttatgataacatctgactaaaatatgtctgatagtacttgtttttattgcttttttaaaaaagagaatatgtttagaaaaaaattttaagtataagcatgtaggccatatttatatataaacatgaaagttaagtgtggattaaggttattgtataaaaagaaaaaagttttcacaaactattaattcatgttctggggatacttggctttattttgatgcaagaggaatgaatctttgggaaaatgttaactgttcaaaataaaagtaaaattcagagttgatattgtaggccgaatgagtagacagaagcttagactgattaacttgtcatcatgttttagtctaggtttgtattttttgttattgtctttggacccatcatagcaatcttttacaaagggtgattttctttctttaaatcttgttctttagcatacagcatacagtaatacttattacaagcagaattttcagacttgattagatttggttggcttaactatttttaatctcttaatatcctcaagtaataattgtataaataagaacaaatctagttgacacagcttttaaaacattgataaatcttaatcgttcagcacttttaaaggcaaaatatagaaatactgttacttagtatatgatcttgctgtaagattgtttcatgtgataaatctattgagttaaattcccttaaagtggcaatctgtcttaaagtcacatgactttacataaaactttacagtgttgaaaagctttagcaagtatgtgattcttgttaatctctttatatgtaagagctaacagatgttattgtatcataggagaatttgaagtatttctgtacacacaaaaagaatatacttattgtaatatctttaccatgaatttaggaccatatcattccataccattttcttggcttaaagcatggatgaccttggttttcttatattgtgccttttatacttgacagtggcttggacatttaaggccatcagacaaggtataaagtctttcatagtcacaagaagtaaaaggtatctgactagaagagaatatgtgggcaagtgccttgctggctgtaattttgttgtcatttcaagtactgtggtggtgtaattgatgtgacagggctgggctttagatgtggtcccttaacttgtgctcactttcagttttagtttctctgtcattcattttgattaggtaaaatttaggtgacaaacatatgcacaccagtgaaagctgtttggtgtaagtttagtaatgacatatttcaataataaagatgcaaagttaatttttttctttactgcttcatgaaaattgcaataattggtgtcaccttacattacaagatagagggtggtgtgctgatggcacagtcagcaggaggttcttttttattaatattataattaaatgattttctggatatagtccagaaacagatgcacgtcgatcatgccttgtccactgttgcttggcattatcacttgctttttaaaaaaaaattgacttgacaccttgtttttacaggttgttattgatgccttcagattgatcaatgctaatatgatggtcttaggacatgaaccaagacaaacaacttcgaatctgggtcacttaaacaagccatctatccaggtattgcctatatttgataatgtgttaaaactcttttaaattttaaaagcctgctataagtagtctttttaagttctaattcttagcattttaatttgcttgcaaattaatttttcttttgttttaaaagaattgtggaaatactgttgtaaaaattagatttgctcatatgtgagtcagtttttaatggggtctttaaattttcctatcatatttgaggaccccctttttgggagcatagtagatcttttatcttgaaagcattctggctttgcatggttaacattatagagaaggaccaataggagtttccggtgaaggatgtaactattatcattgcttgattagtaggtatttttcatagcagaaaacaatggagaaattgctgtatattttaagatatccctagaagtaattcttaaatatacttaaaattttcttctttaaaaaacccacctttaaaataaatcctataaaagacatccatatgttacttgtgatgagagtttatgtcttgttttttattgtgatagtcaattaccattaattgcagttactggtattcagacacttaatatcctcttgagtgattgttttctttgtatcattcacatgccatggtgtttttatacaaatctttattttctgcaaaaattattttaaatgtgtttttaaacgcaccacagtctgtgtctatctagttaattactactctaaagattaattaaaaggacagaaataccatgtttggttaagtagaatacataaaacaaagacattatagtagctattgctgctcccttctgaaaccttgctctgtcatgaggttgtctttggggagttgtggctttgacagttaaccatggttaagccttggttacactttgataactttatacttttaaatgcttaattttggggcagtcactcatctgtaatcttcatcaaagtgaagtgttttgttttaaaggattgaggtgtgttgatttgaaaaaaaaaaatgcaagtcaaggaaaactgcaaagtataatgtgtatgaaataagctaccagtggttttgattgggtacagacaagcctgtacttgcatgttccaagagaatatattattggacctgtttagccttgataatgacctttcttataaacttcggtagcatcatactgcttcattattttttgcaaaaggttaagtagcatctcacaagccaagatcattgtgattactacatggtatgtttctgccagaagtttttactaattgcaagtcactcaccacctgttgcagatttcttttttaaaattaaagcactgctttttaaccttaaaaatcgactgtaatcaatattaataacgtgttttttctataccagtccagtttgtattttttaatcttaccttatagcctgtaatttaaagtgcaccttataaagcaggttccaaacctgtgttaaacaacatgtgtatgtaacaactacagcatcattatttttcctttcattttagtttgttttgccttccagttagaacctgtaaatatatttatttcacagtttatatagcgcctaccagaatgacatctatctgggtgctctacagttttaagacaatttcaatactaaaacacacaaatgagaccaagccaacaagtgacagaacaaagccacaccttaatacactttcttatttttctaagacaagctagaaagcaacccagaagagcctgaagggaatggtaatatctgtaatggaattttattttatgttagcaggatctttaactctgggatcagaaacctttcagaaatgccatgccttttattttgaagggggagttagctggtgttaagaggggccttgctcctaaaccagctttcaagtagtagggataaaagtctgataacagccatcagctcacatgctggtggtcactaatgattttctaacagatttttttttactcttatacttagtagtagagaaaaattatgattcactgtagactgctatttaataacttggggaaagttcaaatatgttaagtaagaaaagattataaaacagaatatatcagttctccattctgcaagtgtatattttatagatggtgcctatatatttataccaggatattagcattggttacctttggatggtagaattatgagatttttttgtctttccttgtccatatttcttaaatttttttacagtgaaacatatattgcttttagaaaatgttattttttaaagtactacttgacagtgttgaaataagctaagagacaaaggttattttcacgttcatgttttatataatagaagccactaataatcctgatagagaggagaaagtataatgcctatcctctaggcttttatattaatatatgataatgtatattatttttattttgcacttggaacatttggctattactttcaaatgtttagaattgagagttaacaagcatttattttagtaactaaattttttaaactattccattataaactgttcagtgacattttggattcttaagtgtcacagtaaatttgaagattggtagtcagtctcatggaaatttactaaatattgatgcatagatgcatgtgctaaggctaagagcctctaagtatagtcttgagtacagttgcattgtttaatagagttaagctatttggaaaacattgtttcagtaattactgaacatataagttataaaacaattgcactagaaaggagccattgtagtcatttagtacatgaggaaacctgaggcccataaagttgagttgcccaggtaatccagtgaggtaatgtaggaactagtactcataaccagactgcttcattcttttatattatcattggaaatttaattaattaattttggcatagaaaatatatatacagttaaaaaaatttaaagtacaaagtcatttagcaaaaactctcccttcctcttttgccttctgcaactcagttctccactctagagggaaccacaaaacacattttgtttcttttcagttattctatttatattcaaaaagcttcattttagaacgtgatttaaaggatatcagttaccaccgtattttcagtttatcaatataaaataaattaaggcaaacaaatttgtctttagatccaagcacacctttttaaggagcatgaaaacttttaaaaacttatcaggaacccatgaatagcttatatataatccgtaagccgtgtgttttataatgcacctgcttttccacagcagtgagtgcatagaggtaaaatcataagtcagttggtcttgtgtagttctacatgaacccaaaaaggacatggccggttgacttatgatttgggaggaaggcactgggggcacacagcaggtgagtaagtgaaattgaaagactacttgaggatatcatttgatttaaacttacctttgttttgttattgttatacctgctgatctttcatgctgtctgtgttagttttaatgcttttatctatataatgtaattgaaaatcaagtagattgtgccttcagacaccagttaatatttcattagtacagttagtctcaaaaatatagggcctagtatctgtgagtccattaactggcttctgtatgtattggctacagcagttactagctttatgaccaccatgtagggttgtgcaagtagtgagtgcatcgcgcaaatgtgcttggatgagggagcttccagctcaagctccactctctacgccagactatgtctgcttagaggactgagcacctttttctaattctctaccaggctgattcacctcctaatgtacacgaatatgagcacagattaaaggaagccctgatcatttctactttttgatctgtacagtatagcatttttatgcactaaaatttaattcattgcttctgatgattattgaaatgagtaaggatttaatatacactcttggtactttacaatcagtcactgctccctatggaatttcatagctcacttttataacagacattggtaaaataagaatctattgttaaagtactcatctaaaatattttaatactcattggagtgatttttgctagcaaagcttaaaaattaacataatgctttgtttcatcctgatccttaaagtaaatagacttaatccaagaatttcctgacatgtattgtggcatagtatgttagaaagaacataggctatggaatcagaatgacctaggttcagatccccatctagccttttactagctagaaacttggacaaattaatatttgtgtcttattttctttcttttttgttgtttttttttttttttttttttttagagatggggtattgctatgttgtccaggctggtcttgaactcttgggcttaagtgattctcctgcctcagcctcccagagtgctgggattacaggcttgagccactgagcccgaccctgcattttattttcatctgtcaaaatacaaattgaattgccctaccttacagtactatgaagattagaagatgtaatgtgtaaagcagatactagctgctcattaaatgttctcttctttaccccttcttcctctacctcagtgacatcttaagacctacattgtaaaagtctattagttagagaagtggtggttattttggttagtttttctctttagattcctgagggttaaccccaaagtcctttttgtttttatacttgttaaaaatatccctaaaggtttatttctgactttcatgtttttctaggctgccagaggatcctttaggtccaccagagtactgttgaacctcatttgaacacttgatgttgtcagagttagatatgggggcagttgtgaattgatttcaggacatccaggattattgtttcttaataaagccatgctattagcttaagattttattatgattggcctgttcaccttggagacagagtgaggtgaaaaaaattctggttggtgagattgcatgtcactggataagagcatgagctagacagacccagtaaagaccaaaatccacatagttaatttggagacatgcataacataattatttgaatcaatcaaaactgaattaggaaaaggggaattccagattaatgtgggtaaagaaacagctgtgttattgtggctttttaggcttttcatttgaaatacccatgagccccctagatatcataaagttagatttaataaattatgaatgatttataaacttagcttatgataagatcaaaccttatctctgactgagcaaggctactgaaactgcttaatttgtgctcctccatatcatgctttgaagaatgtgtaacccgttcctctaaaccttagttttaaacttgtagctaagaagaatactttaatttcatcttaatttacttgaaataaaatgcctttattagaggatggtacaggtattatgtaagaatatatcaacagtttcaaacatttttattaggtgaaaaatattaatttgtcctttttaaaatcatttatctatataggcattaattcatggactaaacagacattattactccattactattaactatcggaaaaatgaactggaacagaaggtaagtttaaatttttatcttataggaggaaaaaaatctttttcaaaccatttaaactattacctggtatgtgatttaaattcgaatttttgacctctttcagtgtttccaaatattattccattattgatgaattgcagcacaaaataagggaatattttattggactatttaaagacacatttcaccttattggtaggtgctgaagtgggagaggaagtaggaaataaatcaaacgttccactttggttttatgataagtcataaaaatatttcttttagttctgtgatttttctgattaacttatcttcttcaataaaaaggccttttgtaattaaattagtaatatattgctctgtaaatttgagaggaataacttaaattgcagttgtgtagtgctttttgtttgtttgtttgtttgttttaagagatagtagggtcttgctctgtctcccagactagagtgcaatggtgtgatcatggcacactgcagccttgaacttttaggcccaagggatcctcactctacagcctcccgagtagctgggactataggcatgcaccaccacacctggctattttttgggtggtgggtgggaggtagaaacggagtcttgctttgttgctcaggttgggcttgaactcctgtgctcaagtgatcctctcacctcagccttctaaagtgctgcaatcattagcatgagccattgcacccagcctagtgcttttagaaaacataccatgtttactctaaagaaaactaagctgagtcaaagggaaacagttttagggttttcagataatttgtactagattctgatcccattttataccagttttcaagtttgattagtttttaacattacctgacgttttgatgaattagcattctcatttgtttctattttaggattatttctagtacagtttttctctcaactaatgccaagtatttaaatctgcctgttgttttttgatattacaatctgaaccagtttcccccctttactattacaattagtcatccacctaattagtttcttgtatttctctctgggaaagttaaaagcattttttaaaagaacactgagtttactgttgattgatagccagtaagttttggttagtgagaccgctgtcaagtcagaaagtgataagtaatcagtagcaaataagatcattctatctagcccaaactgtttctcaccaaggtgtcttagaaggggattctggtacatggcaagtggcagatggagtgagttgggctctccacgcttaccccctctttcaaccagatcacatccatttttaatctaatctatatgctgggggggaggatgtgcaatataagattttccttgaaataagaattctaattttgtttttttaagtttgataaactagagttttaaaaggtcaaatccactcataaactcatctgaagggcccagtgcttgagcatgtgatgagtgaggggagtgggggaccacttcccccttggcgcaaggggatcttataatgctctcttctaattgcctgcctgtgtaccacagtttacttctgctgtgatagatttagttgattaagtgtatttttaacacttatttttaagtttacatggaatgagtacagtctgtgaaaaatggcaccattcagggacaaacaaaattcattcagaatataaatattttatcagactgatatctgacacccatctatttggaaatgtctagctaattacatcaatttttctttctttttttttggggagtatctcataaacttagccattttccttggcataaaaagcaaatatataagcacttacataaattacttaatgttatgtttatgttcttaatagctcagtttagctgttaacctgccttcttggtaacaaaagctctgcctttactcttatccagacaacttgtttacttaacccccagccttactcgagggtcgcaagggaatccttgtccaggtatgataggaatatcctgttgctccttgggaactgtctttgtttgcttttgaagtggtagggaaatctgagtctcaacacttaattataggtagctgtatagcataggtagttgtagcagcacccacatttcccaaacatgtattttctagaacagtatcagtggagaagctaggaaggaatcagagaaactgaaatcatctgtggagggttttcctaattttttttggcatactgtccttacccctggagccatgggagaaaatgggagaattagtgtccttggagccaaaggaagggaatggaggagttttgtatcttcaaaagccttataggtgattttgacaggcagcttattttccaatgtaagataaaatttgtaccacaaatagctgtaaacttctaagcaagtaggataatttttctaaactaaacccccatatacctccaagtacatcttcagattcttatggctcagggatctcatttaaagtataatggttctattgacgaaacaacagtcattttatagccatcattttttttcttttacttttcacaattttgtgaatcatccaaagggaaaaaacttcttatttaatgatggtcctcaattgaagaaaatttgtagggtaggactttaagaaaaaccgtcttaaaatataaacttgaaaacttaggaacatctaagaataagtactcagaattgtaagtccaatttgagaaacattgaactaaggtgtttagtttcatgatcactgatatagaatccaaccccaatttgctggtgtgattgcacactagataattttttttttttttttttttttggagtctcactctgtcacccaggctggagtgtagtggcgtgacctcagctcactgcaacctccgtctcccggggtccaagtgattcttctgcctcagcctcccaagtagctgagattacaggcgtctgccaccacacccagctaatttttgtgtttttagtagcgacaggctttcaccattttaaccaggctggtctcgaattcctgacctcaactgattcaccctccttggcctcccaaagtgctgggattacaggcatgagccactgtgcccggcctagataaatcttttatttgagaataaaagattttcatggcttttcatcctgacaataaggaagttttaagtttttaaattatagatggaataccagaatttgaaggaaactttgagattacctaatacaagccccttaattcatagatctctaaactgaggatcagaaagattgacacaaggtcactcaataaatggggcatttatctcgttatcttggcatttgaaagctaggctatatgaaaaattagagatacttataaatttcattaattcattcattcatcagatatttattgagctattattagatattgttctagaatttagaccctagtgatcttgaaatgaatagggcaaagtccctgccttcttgatttccctttagtgggagagaaatgcagtaaacaagtaaacaaaaatttcaggtctttgtaagcattatacaagtaatacagcaggttaagggaagaaagattttgtttaaggtagtgtagtgtgactattttaggtatattgttgttagggaagacatctatctgtaaggaagagaggaaggtaagttatgcaaagatgagaatagccttctaggtagaaggacagcaaatgcaaaggccttggtgttggagtactccttaagttatattaatacaaatataggagcattctaattggagttcatttgaattaataaagttaaatccattaagtcgaaatgtttttttttttttgaagttttttttctctagacaatgaagggggtatcctcaaggcagaaaaagaattactttttcttttattttttagatgttgctaaatttgcataagaagagttggatggaaggtttgacacttcaggactacagtgaacattgtaaacacaatgaatcagtggtaaaagagatgttggaattagccaagaattacaataaggtaaaagttacttctgccatttcttctttataatctttggaatatgtatgattagatgccaagcattgtgtaagtaattaaaaatagagaatcctgttttgtaaataaaatagtaaatatttgctttgcagttcatctggtctgcaactactcacccttgcctttgtaatgcaaaggcagccatacacaatatgtaaaagaatgaatgtgtttgggatctattaaaacaagcagctagccagatttgtcccatgggctatagtttgccaactcctgttgtagaccatgtaatacagttgcacatttgaaatctcttcattatttagggtatttttttcttgaaagggacaaggagtaaggggatatagataacaacagcacttactacttgctgtgtctaatttattttatgaacgtttccattatttaataattatttattgaaaatctaatgtgccaggcatatcatacatgtatacatatagattgcaactcattaatgggttgaaaacctacaattttaaaatacacatttatacattatgcagtgttatattaacaaatatttattgaacatctcttatacaagttataatagaaaatggatccttgctttatttataggaaaacaggaacagttagacaagcttctaaataaccagggcattagttaaaaatcagtctgtaccataacaccttcatattcagattgtccacacaccagctacattagcatcacctagaatcttgttagaaatgcagactttcagacctaatggctcaaaatctacgctttaaccagctctccaatgtctactcttgtagttagacattagagaaacactaccatagagaagaccatgggaagccctgtaggagctcataggctctgactttcaagctggccaacacccaggttgctgccttacagataaacaacatttgaactaggccttaaagcataagtaagacttgaacatacaaagaaatgttaccctaggcaaaataaacatcacaggcaagggctaggagatagaaaaggcatagaacagatcccgcaatcccaccactggttgcacatccaaaggaaatgaaatcagtacgttgaagagatgtatgcactcccatgtttattggagcattattcatagtacccaagatatggagtcaacctaagtgtcaatcaacagacagataaagaaaatgtggtgtatagatatacatacaatggaatactattcagccattaaaaaaaggaaatcctgtcatttatgacaacatggataaacctgtagggcattattttaagtgaaataagccaggcattgaaagccaaataccacatcatctcacttatatgtggaatctaaaaaagttgaactcatagaagtagagagtagaattgtggttaccaggaatgtgaggtttgggtggagcggggtgggttgggaaggtgttggggagcaaaaaagacataggacatgtttaagaaacaatatgcttggctagcatgcatagaacgtgagggtgaacagtggggaattaagttttaaaaagtttctgaagtctagtaatagcacttgggatgtcaggataagaggtttttttgaggagtttttgtttgtttgtttgtttgctttttgagatggaatctcactctgtcacccagactcaagtgcagtggggtgatctcagctcactgcaacatctgtctcctgtgttcaagagattctcctgcctcatcctcccaagtagctgggattacaggcgcccgctgcaacacccagctaatttttatatcttttagtagagacggggtttcaccatgttggccatggctgttctcaaactcctgacctcaggtgatccacctgccttggcctcccaaagtgctgggattacaggaatgagccaccgtgcctggcctaagagttatttttgatcagaggcatgatatgcttagaacctgactttagaaacatgatttcacaacagtatagaaggaacactgtaagagaagatttgaaatggagagtgtgtttaagaggagcttgctactacccaaacaaaaggtacgaagagtctggattaccatggtagcagtgggaatggaggtaccaataggcaaataaataaagcatggcactggtcggatagacgaagtgaaagaaggaggaggaatcaaagaggaattcaaagtttcctgcctgggtgaccagtagtatggtagtaccattagcattttcaatttaggtagaagtagaaggattgaggaaggaggtaaagagtttatttttaaggaagcaattagaatgtgggactaggaattaatggtaaaggctagagctcaagatttcaggatcatagttaagattgttgttggttattacaccaaaacgtagtatttcccttttaaaaataaatacatcttaaaaaatattttatccaagagacagtgtataaaatttaccaagtgtagcaataagacttttgagagaactaagctttaaaataaagttgatgggcccatacaaatgaaatcccagcagaattagggttggctttgaaaagtatgccctgattatagtgtttcaactggaaatccccattagtgctagattgtagggaaaatatttcttatctttctagtatacgttttcatgctgtggagattagataaagagaaataaatcgctcaccgtattttaaatagttaaccttttataagtaaaaaagttatgacttaagtaattattcagcagactgtaggaatggttttcatttctctttaacattacacgtttaagtaaatttgtattggtactactgccaggaaataacctatttatggttactgctgcccatctacagaagtttttcctattttacagttttaaaaaatctctgtagtactcaaaaacttgtaaggtttggttataaaatgaaaacaatgtgtaagctgtgatatgaaagagtccaaatttgggaatgtaattccctctgtgattgaaagaaatacggtgggtttttttagtaacacttaaaatataaaaagaaaggcccatgctaccaattcttcatagtattctttttaattggttggtgttttaagctaaggtaattgctgttggatgccagttaggtcctaaagtaaaagaaggttagagaataattaaattcttacgtcccaagttttcagtttcaagtctgaattccacacaaattctgcttgattattattagacatttgatttttttctaattactgaaccacaacacccacagttctgttactccaagtctcctaatttattcatgcggagatgcatctgctatttttttttaattttgataatgtttgattacatatttgtaaatgaatgtgcaggtgaaaaaatgaattgtgaagaacattttaagaatagcatagaaacaaaaatttgccttttttttcccaagcatgtagtgctataaatttggagatctgacggtttactgttcaggtagaaatactgacctacttagtaacctgaaagaaagtttcagtatttcttttatatgcttacatatgaaatatgtaaatatacaattacaattggtttaatacagtagctatattaaatggagaaatctcatttggtagtacaatatgataaaaacaacagatataaatattggggaaaacaggtaagatgattattatttggatatgatagaatgtgtttgcaatcaaacataaaaatctaagagaataaacttagaaaactcttagaactgttttaatcaagaattatgtaggtggtaaacagttatataaactgaaaacagttgaaaaatataataggcaaatcagttcacagtaccatctaaaattataaaaatattcaggaattaaccatcacaagaaatgtaaatgtataagtgtgtatgacctttgtgaagaaaatgaaaaacatttgtaaataaattgggacataaccatgtttccaaatgggaagacttagtattgtaaagctgctgtcaggcttcccaaaggttactataattctagtaagaatattaacgtgagctttgaaaaatttgataacatgacattaaagtttatcttcataaaataacaactaacatttactgagtgtttgttacgagtcagaatggaagaaaatatttttacctataacacagagtgagctagtatccaaaaatgcataatattcagagaattcctataaaatatttattttatttttgttttttatttctgtaagttattgaggaacaagtggtgtttggttccatgagtaagttctttaatgccgatttgtgagattttggtgcacccatcccttgagcagtatatacactgcacccaatttgtagtctttgcctataaaatatttttttaaaataagttgagcaaaagagaaaactcactgaagacaaatggtgtataaacatggaaaagttctagcctttttaagtcgtcaaaaaaagttaaaataaatagaaaaatattttttccttttaaataaaaaagaatttttttaggaaaatataccactagtgggaaagtaattgatacatttttggaggccgtctttcagttttaagtgcatataactctttaaaccacatgttctctttaaaggatttattatgaaaaataaaatttcacaaaaacatacagaaatatctacaacctgctgttagatgtacaaaattaaattgtataacaatgttaaaataattcctatcacgttatcttctctccctttttcaaaagtatctctatcttgcatatatgtcaacatattgtgttggtaacagtgtgtgtgaggcaggagactcctatactttatgtaacgcctgaattattttcagtttttgcattaaacaagtaatacttagatctaaggttgtgttagctcaaaataacaatggcttaaacaaggtagaaaggtatgtctcatatttcaagtccaatataaaacttcaaagacattagagacccaggttccttctatctctctgctctgctttccttgtgttggctttcttcctttaggtcacctcatgattcattgtgattgcgatagcttcagccatctcatctgggtttcatgcaacaggaagagaagaaagggcaaaagggggataaatcagtttcctttcaggatcctttccataagttccacacagcactcctgattacaaccggccctggaactatatggatttggactgtatagggccacttatacatggatttttctcataaatatattagaatcttttttgagatgtacaacaatttgaaaaaaacctcaaactgcatagcccagaattattatttttatttttattattaaagacaaggtctcactgtgtcactcagtctggagtacaatagcatgatcatggttcactgtagcttccacctcttgggctcaagcaatcctcctgcctcagccccccaagtagctgggactacaggcatgtgccatcatgcctggctaattttttgtagagatggggtttcactctgttgcctaggctggtcttgaactcctgggctccagcaatctgcctgccttggcttcccaaagtgctgggattacaggcatgagccatagcacctggcagcccagaaatattgaaaaaaaaaaacaaggtatgtcacaaacgcataaaatataggagacactagtctgttttatcatttgctaccataaaacatacactaatctactataaaataaaaatttgtcaaaatgtatacatacatagatgtacatggcaccattctcagttaagaaagttgaattgcttgatatgtactatagatagaggtctgcagctgctgttgcctgccatttcagacaggcaattcaccttgtaaacagataatgtaaacttattgtattgataaataagtacggtactgtaaatgtattttcttttccctacacctttcctaataacatattcttttctctagcttacttcgttgtaacaatatagtatatgatgtatataacgtacaaaatatgtgttaactgtttatattatcagtaaggctttcagtcaacagtaggctattaatagttaagtttgaggagagtcaaagtgacatacagattttcacctgtgacgggttagcacccataaccctcatccccatttgttcaagggtcaactgtacatctcatttgacagaacgtagttaaatggacgcaactagctgcaagaaagcttatgcagtgtgtgcaatgtggtcttttagctggggtcattgatacctttagtaaaatcagagttatgttacagcagaagaaggggaagatggacattaagaaggtgactgtcggattctgccatagaaattttttccaacaaccttaactacagtttctcttacatacatatatacacacacaagcatgtgtgcacatacatatatgatctttattattcatctctatttcatgtaattacattctgaaattgaattctctgtgaaatttttatgaagcaactatgttgtttagggccacttaataaatcatgcatttgacattattattattattattcaggttgtatcagtgaaaagtaatgatttccccaattgccatgaatgtttctttgaggtctttggagatacataggactgtgtttaagccccagtgtcattgcttattgtgtgtatggctagaggcaagtcagcctctctgaactgtgtttccttatctctaaaatgaggttaaggattgtgatatatgtgaagtatctggcacatgataggcatttaataaaatgatagctacaaccacttctgatgttattaatattcttgactcctctctctttctcacatctactcaatcagtaaaccattctgactaaattcttgaattaatctgcctcttcgcattgccagttccactgccttacctcttaattggtttgcttgcatctccagtctttccctttcaaatcaattttccattctgtagaatgatctttctaaaatgcatattggtcatgcatcaaagaaaactatttaaaaaaagagaaaagacaacctacaaagtgggagaacgtttttgcaaatcaggtatctgataaaggtctaatatctagaaaatagaaaggcatgtgtggtggcacatgcctgtaagcccagcactttgggaggccacagcaggagaggatcatcacttgagcccaggagttcaaggcctgggcaacatagagagaccctgtctctacacaaacacacacagaattagctgggtgtggtggcatgcacccgtggtcccagctactcaggatgttgaggtgggaggatcaccgaggcccaggaggtcaaggctgcaatgaaccgtgatcataccactgtacttcagcctgggcaacagagcaaggctctgtctcttaaacaaaacaaaacaaaacaaaaatgaaaagaaagtatacaagaattaaaaacaggaaaaaaaaaaagaaactataaagaactcttgcaatgcagcaacaagaagacaatccagtacaaaattaggcaaggacttggatagaaatttcccagagaagatatgcaaatggttacaaacacataaaaaagatgttcaatcaattattggtcattagaaaaatgcaaatcaaaaccacaatggctagaatcaaaataatgaaaaataacaagtgttgccaagggtatgaagaaattactagtggggatataaaatggtacagccactgtggaaaacagtttggtggttcctcaaaaagttaaacagacagttcccatatgagccagcaattctgctcataagtatatacccaaaagaattgaaaataggtattcaaacaaaaagcgtgtatatgaatgttcatagtagcactgttcacattagctaaagttggagacaatccaaatgtctatcagtagatgagtggataaacaaattgaggtatgtacttacaacatactattactcagtcataaaaaggaatggagtgctgatacatgctactacatggatggacctctaaaacatggtaagtgaaagaagacagatgcaaaaggccacatattatatgattcaatttatatgaaaaaaacagactaggcaaatccatagagacagaaaacagatgtgtggttgccagggacttgggcaaggcaggaatggggaggtaacagcttaatgtgtactaggttttcctttggggtaatgaaacgttttggaatacaggtgattggggcactaaatgtgattgaatcgtacactttaaaatggttaattttatgttatgtgaaatgtacctcatttttaaaaatgcaaattggttcatgtcactaccgtgcttttaaaaagcctttgatgactgacttctcattgccttagaatgaggtccaaaccccatttggctcctgcttgcctctgttgctttatttcttatcactgttgtgttgttgaaatactgagtaatttgcagttcttctaacttataatgctttttcttgcttcctggcctgaagcactccttactactatattcccatccccactccttttcattcaattctcagcctaaccctttctcacttttgagaccctcaccataccaccaaatgagtgctatttactccttctttatatgccagtagaactttgttcttctatcaaatgaatttaaatttttttttttttaagggaccaggtcttgctctgttgcctaggcgggctgcatgatactatcatagctcactgcagtcttgaactcctgagtttaagcagtactcttgcctcagcctcctgagtagctaggactccaagcactcaccactatgcctggctatttttttttttcttttaagatacaaagtcttgatgtgtttccctaggtggtctcaacctcctggcctcaagtgatgcttccccctcagcctcctgagtagctgagattattacagttgtgagccactatgcccagcctaattattactttttaatttcctggttttacagctagtctataagctctgtgaattcagatattgtctcattttatctttagtacactgccagataaatggtagatgctcaataagtatttattaaatgaatgaaattatgctatacttgtatttttctaccaaaaatgtaactttattaagtggccaatcataagcactgttattaactaatattaacataatataaactaaaatttaaggaaatgcaatgtcctctaaggggcacctttcttcctaatcttcaactgttctctatcatggcaccctttgcccctctcccttccttgaggctaactggataaaatataacctcctacgtcattgatcatttccttccacctgcctccagtattctcggagtcataaccttttcatgacagagtatggcgctgatgacaatttgctgtttccagcttgttaaaagagatgagtgatttattttcttagtgcactgagtcttgcatctctttcagttattttccttgtcctcttgccttcacatcatacctttgaacttctgaagtctctttttacttccatggccatacattcccgtggttcccctgactttttggcaactacacactctgctgcctttgctatgagcatttccaagattcagcccttgcctttctgctcttctgtttttatacctttctttaaaagtctgttttcatagtttagcaatgccaacaactttgaaatctcttcatttcctctcatttgaaatgtattatcatctccactgtctgagacctttccagttacatgttcattacttcagatgctgctgttcaagagtaagcaatattgtctaccctactttctactttttcatgacagttccctctaccaatttggttataactgacactcatttttctaggcatcgtgtaggtttgaaactttggactcatctctcttgctcttcttccacatccagccattctcccatggtttttccctttccctgttactactaagtatcacatgatgtgttcctccctaatgcattctttatactctcatcctgactctccctctgtttccccaggtgatccacaagaaaaagttaggtacatttacttaacccctatgtccccatcgtgctttgtgcacactccttttttgtatgttttacactgcattatgatttgagaaaagcccaaatgtgagctccttgagagcaagaagagtttgaaaaattccttttatgctagaaattttgctggaattaacatatgaagtgtagattaacttctttattgagatgttttaaggattcagtaaattaatatttgtaaaatcatgcctatattgatgtttaattagtgatggtagtagaaaaactagttttaatgtcttcatataacacataatattgtttatatagtcaatactttaaaaatcatgaaagaagtaaaatacatatttttgaaatccactagcagttatgcattgattgcttaatagtgaaaaattagtatatgccattttagcagtttgtgctgtcttatgtaaaaattgccataatggtgatattaaaaagatatttaaatgggatcatggcatgttatagtgcgaacaaagttaacatgttaatgtgggaaaaagaaaccaaagaaatagtgaaagaagtatgatgtggaataagagagatacagggtggcaaaagcaaaggctaagggaatagaagagaagacagatgttggagtagctctaagtatgttcagaaagttaaaaacaacaacaacaaaaacaacaaaaaatccattggaattgacctcctggagatccttaagagtgttagtgaagtgccaaagatcccatcagtgtttgtaaaagggtaaataaagtgatggaatttgagatacagattttccatataagaaacttgaccattagcagaaaaaagagaatgaggttaatgggtttagtaaaagcctctgtaagataggggatacattggaggggattatgatcacataacagaccaaattccaaggatttcttagagctgtgcagaccgtgcatgatgggatagccatctgggggtctttgttgataaactgttaaaaacgtttctagtgtgaatagccacaaacattttcagtgcttttttgttggttgagtaaaccgaagagcacgaatgcaaaagcaaaatttgacgccaaatcacagaagttgccataaacacagaagttccctagtgaggacactgcctgtgcctgaatttcatttgtttctgctgcaatcatttcttacgtttttcctggtaactagccagattagaactgtgaatgaagacaaactggtcttgcccagatggtagatgagatacaggtaacttgggtagatagagaaaatatttaggcatttgatttggaatatcttagaattgaagagatatgcttactcttttgtcatgggggtttgcaaccttagtatatgcctaaatctacagctgctcctcatttcccagatggcatctatggctgggagtactttttaccatctgtacttctcaaagagtttgtgaactctctcttttaattattgggaatggaaaaactaattggtaaagtgggtaaattatgtaaaagatttttaaaatttgaattagcgctttttatacctaacttttcaaataagatcagtacttcaagtcctttttgaccttcatctttcattgtctatctaccatctttgttgtttgcaatattccgcaatactccctaataactgttttgtacatggattggtattttgagccaaattccaaaatttttgcctccttccaatactgtagtaagtactgttgttggcatgtacccagaacaactaacactgaatgggtatggagtacaaacttatgtgaattgttccattcatctaagtgcttttaagtcaataaagtttagtgtcacaatttgtgaaagtaatttagaaaaacatactcttaatatgttttgtcaatgtttccatttatgtaaaacattgaatagtgggagaagcaatttcccagttaggaaatacttttataactgaaaataatagagtgacatctgactctgaaaatgagcatattctctgtctagatttggcatgttattaactttttcttctttcgggcttatgagtcataaatgcatttcctaatgatgtgttgtaaataagtatcctttgataatcagtagatacaatacctattcactatcttttctctttaggcaggttctactggggaaaattctctagatagtttgtccatttataaaattagacacttgccatctttgctcattttcaagttctctgtttacaaaactattaagaaggtgtgaaatgcagccaaacttcccagtttatggggaatgtctgatgattacatttcctacatgttcattgttcgcacatgaagaaatttggcagctgtgagattataaagttcagagtatccaaatctaaccctcactgggattttggttccctgctttctgccaccaccatctcacctccttttgtaactctttttgtggtaaatgctgtgttggcatttcttaaggttagtgatccttaaattttcttgtttttttttccatttatcagatgctatgaataaatcatagattaaaagttcacctgatacagagtcttgtcttcaggccataacatacccaaactgttaagatttcttacgtgtgaaattctcaataaagaggttttatattggtgccattattgggagaggagggcagtagtggtagccaatctaaatgttataattatttcagaattactctgccagaaagttatgatcatacatagaagagtttgtagctaactttgaaagtagtggaaagtggttttcatgtattgtttgggttaatttaattttgattatatttggtttttagttcaggtaatttttttgttgaaaacttcaaatgacaatttcttcatggttactaaagatcactcatgtggagtagtttcagatttttttctgaatacatgtattacttttagagatgtaaagatgtgaaattactaagagagaaacccatgtgatttgtttagtggatcaaaagtcggtagctcctttgatcctaagtgccactgatagttaaatagatactgaagctatgggcaggctggattgataagaaaaaaggagacagagaaatgggaaattgggaaagaactgtgcaaataggaaaaggagagagcaacagaacagaattagtaccacagtgccgtaagtgccacctcaggtacttccatctcccatctcctgaagaattcagtaacagtttgcaaatggtcaacacaatcatttagtgatcctgtttgatattttcaatactttctgtgtatttcttgtctgttttcaaaatgatgatgctgatagtttttattgccctgaaggttattctgaagtttagcataattttatttgttcagtaaattatttgaataaaagttgtatgaatgaaaattctggtcatcattatttttggtgattatcctgcagtgggaatagaggatttataattttaaactctgtcctttgtgtttcattcacaggctgtagaagaagaagataagatgacacctgaacagctggcaataaagaatgttggcaagcaggtgaggtgtactgttaataagttatgcagttgcataataacatgttcttatagagttaaaactgttttagggcctatataatttttttcctgtccactctatgtttttcttctgtcatgtaaatgtgatactaattgtaaaggtcactaaatttatttgatgtcaggttctctatagagaagtaaatcacaaatacctaagagatattatcgtcagtgaaaataatttactaggaacaaattaggacacttgtatcctgaattaattttttaagtattatttttacctacagataaataagataatagaagggtagatttatttcatgtgtaacaagttttgttaatcatgtactttatcaatatgtaggtaatattcctgagaaaggttagagccttattgggttatactgagtgaagagaaagggctttaagtatttgctctttcacttttctaagaagaaatatatattttagtctctattatctgagggtgggggaagacaccaaccaattaaaggaatctacagattaattagactgttttttaaagaatgttgattacattttttccccatttcatggaacatggttatcatattgctgatgttggcagaatcttgatatttcagatgcaagacactaagctgtctttgctttcagccatcctaccatatgctctgatcccatcacatctcacaagctatgtaggtttgggccaggaccattcttggatgggaaatctctaagaatcacccagctgccacaagaagtaatgtagataactgagggaagcgtgttaccaattcactataaaatgaattactccaacagagcagtaggggcaaaggtctgactttatcatatgtcataaatgagaaaatcaaatttcactaccttctaagtattacagtttaaaaacaagtaccctcaaaaagcaaaatgaaatacagttcattttattttctcatcttatgtgatatcacccttgttatcttttccactacttattttaatcataatactagatcaccaacttggagccttatactttatagaattcagtaactgttttttgaataaatgcctttccaaggccatagtttcttgatacagatttaaagcagcaaataaaaggtctaaatacaaaatgaaactgaaaaatatgtaattggcaaagtttaataatcatcagaatcatttttaaaaatatagttattacctcactggtttggcctactgcatggcaaaagcaaaactgtctgtaatggaattaaaccaatatctttttttctcctgccagtgtttctcagtgtttttcacctaaaatgccctaagacttatttctgaaataaaaaatatattgtagtctagtcacttaattatttgtaacatgttgtatctctgggttgtttaaaaaaaaatagtgtattaaaataagggttagaaaagcatggccaagaaataattccaataatgaacatttgtttaaagttaggagtcttgggtattttaacaataatcgtaagaatataatcatttaaattataatttttctattgtgtataatatatattccttatttcaaagctctgaaattttgctcaaatacttaattctgcctaaaacataaatacatactaagcattttaatttaaattagtttattacaatacaattttaagcctcctttttaactcagtctatttcaaaaatagatttgatcaggtttaagttaaaggattgcacctgtataatttgctatgatacatttttttcaaaatagctacatgaaacattcttaacattttagaattgatccaaattgtatttaaattcttcaactacaaacggcagcttttgatccaagaatattttctgaatcatttaaagcactactcttgaaatattaaaattgtacagaattctgatttttgctattataaaacatagaagaagtgctgagaattcacactgaactcttaccctttggtatgtccgctttgaattaagcattctctcagacattcaagatatatgaacggtagagaatatacacatatattcagacaggtatacatatataaatgaaattttttaaaaaatcagatgattgtgagctgtatagaattccttgttactctttataaaaatctctggtacatagtcattgcattgtataaatcaagctttcattgtgtaatctattattttattagctacttaactttttgatttagaaattctaagaatgtaacaatatactagtaaagttaaattgtaaaatatttaagtaaggtctggctttctttactagtttcatcagctactgaaaaaaatttaagtaatttatctaccagtaatatggttctgttttctctttcctcatttttgttcttttaggaccccaaacgtcatttggaggaacatgtggatgtacttatgacctcaaatattgtccagtgtttagcagctatgttggatactgtcgtatttaaataaagcaacgaaaaacgc

SEQ ID NO: 18 - DNA, 26723 bp, Homo sapiens
ttttgcggctccacgtcggcaccagctgcggggcaagatggaggcgctgattttggtaggagctggaggggcagcagagatgctgtggtgtccacaggggccgggagtcagggttcagcccgagtgggagacggggaaagagagttccgggtaattcttggggactgagcgttctgctgacctttggaataagtgtgtggcctagtgtaggagctaaagccttggtttagagtaggaagccctgccggggagagggcatagagtcggtggaaagttgaaggcagcacatggactccttaggatacacagacctgtaggcgtactggattaggacccttcaggttgccccttatttttagcattgtggatgataccctgattttaatttaccaaaccaccaaactcgccccatattgtaagaaaagaatacagatgttttgtcgttacagactcctcctgatggtttcccaagtttgactctccattgccgattccctgccacattccttcaggaaactgttttgtcttcggtttcctgttaatccctattatataggtttgtcaaataatcagtattccatcaaagttctgggatacctgataaagttagcatggattgtggaatattttttctagactccttattctgttctccttttctctacccatttagaccttaggaattctttttttttttttttttttttgagaccgagccttgctctgtcacccaggctggagtgcgcacgtggcgcgatcttggctcactgcaatctccacctcccgggttcaagctattctcttgcctcagcctcccgcgtagttgggactataggcgcgtgccaccacgcccggctattttttttgtatttttagtagagacgtggtttcaccatgttggccaggctggtttcgaactcctgacctcaagtgatccgcccgcctcggcctcccaaagtgctaggattacaggcttgaaccaccgcgcctggccaggaattattattattattattattattattatttttgagacggagtctcactctgtcgcccaggctggagtgcagtggtacgatctcggctcactgcaagctccgcctcccgggttcacgccattcttctgcctcagcctccggagtggctgggactacaggcgctcgccaccactcccggctaattttttgtattttttagtagagacggagtttcaccgtgttagccaggatggtctcgatctcctgacctcgtaatccacccgcctcggcctcccaaagtgctgggattacaggcgtgagccactgcgccgggccaggaattcttattgtatgatctaggatgctaatttctccctctctggttacatgagaattgtggtcgctaaagggctgtattagccctcttgtccatatgatgctttatgcttgttctaacaaataaaatacctgttacccctttttagaactggaccagagaatttctctcaaaagtgccctattttgcgatttggaggggtgtgtgtgtgtgtgtgtgtgtgtgtgtgtgtgtgtgtgtaggtaggtaggtagtatagtgtaggaatttaactcccagccttcttccttaattggcttgaactctaggcctctttccaaagaagcttgtcttttattttccttcagatctcctaagcatacacattcagatcctcatcagataaaagaataacaggttttaattcctctctttcagttaaagacagttaattccttatgtcggttggtcaaatataggtaaaaagcttaaaatctgagtagttttaaatattttctgtaccaagcagttaacaagtattctttttttttttttttttttttttttttttttttttttgagatagagtctggctgtgttgcccaggctggggtgcagtggtgcaatcttggctcactgcaacctccgcctcccagaatcaagcaattctcatgcctcagcttcctgagtagctggggttacaggcacgcgccaccatgcccagctaatttttgtatttttagtagaaacagggtttctccatgtttgccaggctggtctagtcttgaactcctgacctcaagtgatctgcctgccttggcctcccaaagtgctgggattacaggtgtgagtcactgcaccccggccagttagcaagtttttttttttttttttggaaacagagtctcgctgtgtcacccaggctggagtgcagtggtgtgatctcacctcactgcaacctctgcctcctgggttgaagcaatttctcctgcctcagcctcacgagtagctgggactacaggcacgtgctgccacacctggctaacttttttgtattttagtagagacggtttcactgtgttgcccaggctggtcttgaactcttgagctcaggcaatccacctgcctcagcctcccaaagtgctaggattataggagtgagccaccgtgcccggcagcaagtattcttaatcaagaggttgagtgcagtggctcatgcctgtaatcccagcactgtaagaggctgaggcaggaggatcgcttgagcctgggagtttgaggctgcagtgagctatgattgtgccactgcactccagcatgggtgacaaagccagaccctgtctctaaaaaaataagaataaaaaacctccccctaaacccaattagcagactaggatagattctagggaattggtttttttggaagtttttagacttacctatatatgtttagaagggagcctgcttaaaggtaaaggaatgaggaagataataattggggagcccttttaacaatgggcctgtgtgtagtgggtaagctgggggagttatatgtgaaagtatctctgtcgggcgcagtgcagtggctcatgcctgtaatcctagcactttgggaggctgaggtgggcggatcacttgaggtcaggagttcgaaaccagcctggccaacatggtgaaaccatgtctctactaaaaatacaaaaaaaaatagctgggcgtggtggcacgagcctatagtcccaactactcaggaggctgaggcaggagaatcacttgagccagggaggcagaggttgcagtgagccgagatcgcgccactgcactccagcccaggcgacagtgttagactccatctcaaaaaaaaaaaaaaggccgggcacggtggctcacgcctgtaaatccagcactttgggaggccgaggtgggcggatcacgaggtcaggagttggagaccagcctgaccaacatggtgaaacccggtctctgctaaaaatacaaaacttagctgggcgtggccacgcctgtaatcccagctactcaggaagctgaggcaagagaatcacttgaacctgggaggcagaggtcgcggtgagccgagatgcgccactgcactccagcctgggtgacagagcaaggctctgtctcagaaaagttaaagaaaaagaaagtctctctgtcacatttctcttcccttagttctctgtctctgcttcttcagtgaagtctgtttcagcctgcttcttccttattcttttgctttaatctatgcctaataggctgcattcacagatccctgctaacttgatcaggtaaccctggactttgcttttaaaaccacactggttctttgttatgggaaacctatgtaatgcggttagggacaatctgatcaaagcatattcttctgtccttaactctacaaggtacatacatagctgcaggatgtcgagaaaaagggacaggtaagctacagggggtcaagaagaactgttgatcaaagtttgcattgattgtggaatttctaaataacagtaagttcccttcttttaggtactttacagtgggtcacatggtcacatttctttcttgaattaagtaatccagctctagctttcaagcagatttgtctaatctctctcaggtctccttaggctctaaggaaagagaccctttcatctcttttagttcccaatgcttaataatagtgatctcagcctgcatctttggacttggcttcttctctcttgctgtatctgctggttctcgctttttgagttgtgaatgaagaggatctctgcagatcaccattctccattaataacctgtggaatcttaaagataaggatttccccttcctccttcctgctttactttttttctttaaagctgaattactcgggccgggctcggtggctcacacctgtaatcctgaggtgagtggatcacctgaggtcaggagttcaagaccagcctgaccaacatggtgaaacccgtctctgctaaaaatacaaaaattagctgggcgtggtggcatgcgcttgtaatccccagctacacgggagactgaggcaggagaatcgcttgaacctgggaggcggaggttgcagtgagccgagggccattgcactccagcctgggcaaaaagtgaaactctgtcttaaaaaacaaacaaaactgaattctgtatcggtttagatctttaaatctttgttcataggttttatttttcctaatcctctctggattcactttcagagtgcttctccagtgctttacagactagacttctaattctgtactttgtcttaccttaatattttaaaaccataaccaaatcctaaattctaagcctcattaaaaaatcaggccatccaaagtgcacaaggatatgagtatgtatggaggaggaaactatgcagaatatgtcaatgactttaaaggttgatgttgctccttggcctttgcttcctgaatcatcttaatggggcttttgttaaattcctttggccctaacagtagaggtacttggcctaaatgcccccctccccctgctctgggcaaaggtatcaattacattaagcccctaaagcactcccatctcgttcctggcagtcccctgtgcccctctcccagctgcgtccttgctggtgcctggccccctccattttgttaggagaagcaatctcctcattcctgcgctgtggagatatatttctcagctagggcgcgagcagtgccagcactgcccccggtgaggtccctggcagcaataaaaatttttattgtgattatgttggtgtcggggtgtccatctgggttattgcacacctagtttaattgattgaagtttaatttattgacacttcaaattaaatgatcagaataaactgtgctgttactctggccagcttgttttaatggttgattgctggaagcagacctcggcttgaactaaaacccccaaagagcaattgacgctgcttctaactctccccatgtcttgccctccaagaagaccttgttatagatttccgacgtatttatatatattttttccctcttcttcacagtggtgggaaagagttggtccctggcaaggtataaattatatcaaagatctaggggagctgtcacatggtcagaagaggaggagggggcctccatgtgaggaaaaccagacccttgagaagccaggtctgccttgggaggcagaggatgagtgcaattatccaggtatttgacggagcctagtggcaggtttagggtcttttttatctagatacttgctgctgtttcttactttactccattgacatggcttgattagagtctggatgttgacaagaaaacaggttgtggaaagggaaactagaggagcaaatcagatggagcagggataaagaatcagtacctatgtacccacttgtgctggagtaattaggaagaggaaaggcagagtgcccaggggacagctgatgaagatggattcagagaatgagtccatgcacttgtaagatgcttgtgctggcaagggccctctcacattctgtccctcctgtttttgggcagaataggtttccttacatcagattattagggggatctctcctggccttacattccctagcctgtgtcacctcttctggtgtttgaccacacccatctcttcaggaagtccttcctgttgtgtaatctaagttatatatgctgcagatgaagcctgcttttttatttggctttttattttcacactcttttttttttttttttttttttttgagacagagtcttgctcttgttgcccaggctagagtgcaatggcatgatcttggctcaccgcaacctttgccttccaggttcaagcgattctccttcctccgcctcccgagtagttgggattacaggcccccaccaccatgcctggctaatttttgtatttttagtagagacggggtttcgccatgttggccaagctggcctcgaactcctgaccttgtgatccacatgccttggcctcccaaagtgctgggattacaggtgtgagccactgcgcccggcctattttctcactctcaatgcagatatcccatccatagccaattgccctggatagctcggtcaactaattttctgcaactccttttctgttgtgtggttttagagggagactaaaaccagaggagaatagagcaattctgcctcggggttgatttgggggcataaatagactgaaagataacacagagtctgtcaattcagtctctcagagactagctttttgttttcaggagcaaaagcagggagatgtgggggggagtaaagggataaatcatgatacaaatcgtgacccaggactcatcaggaatggatctagccccttttgatttttttcctttgctgagtgttatttaagtgagggctcctggattaccaaactgagaaggcagaatgttctaatggtgctctcaggcctcaggtctggagtatagtctgatttctccttattcagttcatctctcttcccagcagtactgctttgtccctcatttctgtgattctttcacttccatgatagttgaagaattagggactatgtgacccctgggtaaaaaatcctccagcaaggccgggcgcggtggctcacgcctgtaatccagcactttgggaggccgaggcgggcggatcacgaggtcaggagtttgagaccagcctgaccaacatggtgaaacccgtctctaccaaaaatacaaaaattagccggtcatggtgtcacgcgcctgtaatcccagctactcaggaggctgaggcaggagaatggcgtgaacccgggaggcggaggttgcagtgagccactgcactccagcttgggcgacagagtgagactccgtctcaaaaaaaaaaaattttccaacagacaggctttctgagttttgagaaaggtcctgagactttgcattcctaaaaagcttagggtttggttgtctttgtcctgcccatttcacagtcatcaaattcagccattgaaagctggaggtggctgggcatggtagctcacgcgtgtaatcccagcactttgggaggctgaggcaggcggatcacctgaggtcaggagttcgagaccagccttaccaacatggcaaagccctgtctactaaaaacacaaaattagccaggtgtggtggtgggtgcctgtaatgccagctatttgagaggctgaggcaggagaatcgcttgaacctgggaggtggaggttgcagtgagctgagattgcaccattgcactccagcctgggcaacaagaatgaaactcagtcttaaaaaaaaaaagggaaaaaaaaaaagaaagctggagggagcgtggttgctgacctttattccccctgctggctgttagttttctcaatcatatttattaatttatgaaggccacacacacatttattgaatttatccagcattactggatgccaggtagagtagagggggtggtttacaaaagtatcactcatttcccctctttttcctgccccctccacaccatcttattatctccagagagaatctcatttaattctaaactcggctctgtgaactctttgaaatcataaaaaaattatttttatttatatatatattttttgagacagagtcttgctctgtcatccaggctggagtgcagtggtgcgatgatcttggctcactgcaatctccatctccggggtttaagcaattctcatgcctcagcctcctgaatagctgggattacaggcatgcaccaccatgcccagctaatttttttgtatttttagtagagacagggtttcgccatgttgcccaggctggcctcaaactcctgagctcaagctatttgtccccacattggcctcccaaagtgctggtattacaggtaggaaccagcatgcctagccatgaaatcataaaaaaatttgtgaatgtattttgctgggaataaggtccatagatgtaattggtttatcaaaggggtctgctgtaactcaaaaaaggcattaaccttaactgatctaggtcaagcctctcatttctctgatgaagaagctgaatctcagagaaagggaaaatttgagttaatggctgatccccattatagtacaagtattgtagccaggcatggtggtgcatgcctgtagtcctagctatttggaaggctgaggcaggactccttgagcccaggagttcaggtccagcctgggcaacatagcaagaccctgtctctatttaagagatggattgtaggagtttagagacattttctcctgtaatatcaaaactcttgttgactgtgctttacatgttttgggtctgtgtcagataggaagattgtaggtgtctcttcctgccgtcagttcttcccgagtcatgtgttgagttttttctttataaccaatatttggtctcatgtcagctgggtagtgttctgtggtaccagtggctcccactctttcctgagctgtgctttttgaatctaatcttgtgtgtatacagaaataattagcagggtgtggtggcatgtacctgtagtcagctacttgggaggctgaacggggaggatcgcttgagcctgggaggttgaggctgcagtgagctgtgatggcaccactgcactccagcctgggtgacaagaaataataataatattaataaatctgatataggctgggcgtggtggctcatgcctgtaatcctagcactttgggaggtcaaggtgggcagatcacctgaggtcaggagttcgagaccagcttggccaacatggcgaaaccccgtctctacaaaaaacacaaaaataagccaggctacaaaaaacacaaaaataagccgggcgtggtgggaagcgcctgtaatcccagctgcctgagaggctgaggcaggagaattgctggaacccgagaggcagaggctgcagtgagccaagatcacgccactgcacttcagcctgggcaacagagcaacactgtctcaaaaaaaaaaatctgatatgtaaaaactgctcttccctgtcaaagactttagctaattcttcttttcttttcatctgaagtctatcggattgtggctggcaaattggagcccttaaccccagaggagcttttaattttaaaaaagttggcacaggctgggcacggtggctcatgcctgtaatcccagcactttgggaggatgaggcgggtggatcatgaggtcaggatatctagaccatcctggctaacacggtgaaaccccgtctctactaaaaaaaatacaaaagaattagctggtcgtagtggtgggtgcctgtagtcccagccactcgggaggctgaggcaggagaatggcgtgaacccgggaggcagagcttgcagcgagccgagatcagaccactgcacttcagcctgggcgacagggtgagactccgtctcaaaaaaataaaaaaataaataaaagttggcacagaggccaggtgcagtggctcacacctgtaatattagcatgttgggaggccgagacaggcagattgcctgagttcaggagttcaggaccagcctgggcaagatggtgaaactccatctctactaaaataaaaaaaatcagctgggcatggtggcagtcacctgtaatcccagctactgaggaggctgagacacgagaattgctggaacccaggaggcggaggttgcagtgagccaagattgtgccactgcaccccagcctggacaacaaagtgaaacaaagtgaaactctgtcaaaaaaaaaaaaaaaaaagtgttggcacagagtcaggaagtatacctacttagccatttggagctgggagtggtatctaggaatttctccttctagtttttaccttcttagttttactttataaacaggattgagacaagagaatcttgttacagtttttaattcaccaagacccattgccacatcagggtaatgccacatcaggcccttttggtatggccttagggaatgttttttttttttttgatctgaagtcttgctctgtcgcccaggctggagtgcagtggtgcgatctcagctcaccgcaacctctgcctcccaggtataagcgattctcctgcctcagcctcctgagtagctgggattacaggcgtctgctaccatgcctggctaagttttgtaattttggtagagacagggtttcaccatgttggccaggctggaaggatttatttttaagtagacaatgaagaactttttagtgatctcagtcagcttctttttttttttgaggcggtctcactcttttgtgtaggctggagtgcagtagcgcaattgtagctcactacagccttgaactcccaagctcaagcgatcctcctgcctcagcttcctgagtagctgagactacaggtgcatgccaccatgcctggctaatttttgttttttttaagttcttgcagagacagggtctcactgtgttgcccaggttggtcttgaactcctggctctagtgatctcctgcctcagcttccaaaagtgctaggattacaggcatgagccactgcgcctggcctccatattcttatttgtgctctttcagctctgtagatggcatcctgtaattccctccatagaggcttcttggttttttcccctaaatgaatcaaataattcattatagtttccaagtatcctctctaccttccccaaacatattctcccagtcttctggtggcttactaagatcttaccccaaagagttctcttactatatacattgtgaacagacttaattcacttatttttcagggcccatctctactagtttgtcctacaagacacacaaatagagagcttttgccgggtgcggtggctcacgcctgtaatcccagcactttgggaggccgaggcgggcggatcacgaggtcaggagattgagaccatcctggctacagtgaaaccccatccctactaaaaatacaaaaaattagccgggcatggtggcaggtgcgtgtagtcccagctactcgggaggctgaagcaggagagcttgaaccaggaggcggagcttgcagtgagctgagatcgtgccactgcactccagcctgggcgacagagcgagactccgtctcaaaaaaaaaaaagctcttatccagagctgcctttgaaaaatatttttgcttatgactgtaatcctgtggaagctgcaggtcaccgagaaggcccacagggggcagcactaggaatgactctttccctctagtcctctatgcgctaggggagagagttcttggagatgttgatgcttttcaccaggctttagaagcccctgattgaggccgggcacggtggctcacgcctgtaatcccagcactttgggaggccgaggcaggcagatcatgaggtcaggagttcgagaccagcctggccaatttggtgaaaccccgtctctactaaaaatacaaaaattagctgggcatgggggtgtgtgcctgtagtcccagctacccgggaggctgaggcacaagaatcacttgaatccgggaggtggaggttgtagtgagcggagtttgctccactgcactccagcctgggtgacagagagagactgtcgcaaaaaaaaaaaaaaaaaaaaaaaaagaagcccctgagatcaaagattcatttgcagcagcctagttgcttgttctgtggtgtttcacctgtcttgaggacagcattcttgttttcttgataataaaaacataaatacatgaaaatctgtctaagtcacccaatctcccacaaaacaatctgcctatacatcatttccaagcacgattagcatttgaggtgaagttctgttatacactcaggctgtggctctctgaaagtcagtgcatcacagaactttgtctcgaaagctttctagcagctacccattttgggagtgggagggaagaatagaccttttaaattctttcagtgtggccctaagctgataaggtctttctcaacagtcagcatttaatgtgttacaaggtcaagcctagtccattgtcctggaagcccatttctcagtagctgggagttatttataaacttgccctttgcaaaaacttaaaatgaaattacattatcagtaatgacttctggggcctttaaactggctagttttatggcatagccctccccactcctgagaggtaaaagccccaggctgaagtggaaccagctgcagtcaggaggtggcaggagaagtaaagaagctgctggctccagctgtagcagaatggagaattgaagcggcatttaagcgcctgcctaaattctcagctttatttagtatgcttcctcctttggaagtttgaaatgaccagccttttctgtaatgccttctttcccttttgagagctccagtaagctctatgtcaaatctagtctttatccttgtcctccttagcctgtcttttattcttcccaggaagatccaatgtttctatttttggggtttctttgataatgtcttctaggaagccagtgaaaagaaccaagagcagaacccagggatatgttctctctttgccggtgtggctgttgtaggcactcacaccctgttggccacaaaggacattgtctgactctcccagttggctgggggccattagggctttgcttttctttgggttctagggatgccaaactctatggctgcaagaaccagtttcctatgccaggttaatgcccagcttaaactaatgggcagctctctaaagttgctgtgaatgtggatagaggaacagagccaaagatttccaggaaaaggttgtgggaaaaaatgatttcgtctaaattttgttccttttggacttcttttcttccattaagaaaactcattcccattgttgtctcccttttggaattgaggacccaagttgttatagaactgagcctgctttacaggaagatctttctgtgaggaattaggagttaggagagctgcttctacttgtgaccttttaagactagactctagaggacttccctccactaggcaacaaagttctttagtttgagagaggagttactcatgccttgtttattccagagtgttatatatacaggatggacatctctaaggagtgtttatcagaggagggataaagttggtagtaatatcacccaaagtggccacatcagaaaatccacttatatgtggaggtctaattataagtagtcccttagatgcatactgcgtcaaggtattttaactttattctcaaacttcctttattctctgaattattcaccaaatattgagagtttagtatgtgtcaggcattgttctggacaaatgggacaaaccagcgaacaaaacaaaaattgcagtcctcaagaattcaagtagggaaagcttatgttcctcatcaccttgttgtcaaaagactgggttccttttacttccattctgaactgccctcctctgcccccgcaaacagggttgattctttgcatggaaccataaacctcctgaagcctcatgaggcaatttatgtttgtagaggctgcagtttctgggttcttggcaatgattttttcctcctcactcttggatatctgtcaaacacatacttttgtgtttggctcctgtgaggactgtgggtttcttaaataaggccaggaaagaggtagcaaagcaacagccttgtctcagcacaagggatatcaatggtaagtaatgttgattagaaagtcaaggaatgtaggtcgggcgcagtggctcacacttgcactttgggaggcctaggtgggaggattgtttgagcctaggagttcaagaccagcctgaacaatacagtgacaccttttctcttaaaaaaaaaaaaaaaaaaaagaaagtcaaggaatgtgaggctgcaaatacctttcatgcacacatcactatctctccacacttttggttttttctattcaatcaattagagatggggtttcactctgtcacccagcctggagtgcagtggcgcagtcctagctcagcgtggtcttaaactcctgggctcaagagatcctatcacctcagcctcctgagtagctaggactatagatgcacgccaccacacctggctaattttttttatttttgtagagatggggggtctccctgtgtttcccaggctggtcttgaactggccttaagcaatcctcctgcctcagcctcctgcgattttccttctcctagttagctggctcccttgaagttgcagtggtagaggagagcaacagaccaccacaggttttgcaagtgatatacttacagttgaagaagaaccattaagactgaggccgtgattccttatttgattcttggtagtggaaaaaaaattaccctcttgctcactcactctaggccccagagtgtttctcagatagatcatcttctcactgcttcttaactcccccaaaattcaggttggcttttgtccttggaagttaagtggtagtggttaaggtatagtggaagaattggagaacataggagagtttttgaagatggctgttttactaggctgcattgagaactggtgtgcctgtgcgtgtgtgtgtgtgtgtgtgtgtgtgtgtgtgtgtgtgtgtaaacgctcttttccctctgcttagtgtgtgggtggtttagggaaggcttgctttatgcttctgcattgctactgcattcggactgcagaaacttccaagtatactaggacattcaaccctattttcaaatggctttgttcagtgccttttaattaatctggtcacattctatagccacctgtacatgggagagcaggaagggagagggtaatttggaaaataactgtaccataatatttggaaataacagcatgacctctcttgattaagccccctgtgagtcagagaaactgtttctctgatggtactttggaatcctttgtttaaatgctttctctgtcaattcagtttacttaccctgggtctttctcaatgggaaatatcaaaatctgaccaagttgaggtaagggacttacagaggtacctctgtatccccttgcagccccagtgggactaggggaaggtatctggtttaccagtggtgatgggaggcttcaggactgaaggtatgttcgtatctcttcaggaaccttccctgtatactgtcaaagccatcctgattctggacaatgatggagatcgactttttgccaaggtgagattccctttcgaattagtttaggaacagcacaaaggtttattctgagatttgaatcttgggactgataccttattaacttatgttcctcagtagtataattttgagaatacttccatcttttttttttgagatggagtttcgctcttatcacccaggctggagtgcaatggcgtgaccttggctcactgcagcctcagcctcccaagtagctgggattacaggcacgcgctaccacccccggctaattttttgtatctttagtagagacagggtttcagcaggttggccagactggtctcaaactcctgacctcatgattcgcccgccttggcctcccaaagtgttgggattacaggtgtgagccaccacacccggcctgaattcttccatcttatcttgcctactccagataaaacctgttttcttttgtcccttagttgtactgctgccctgcttgctgtcctcagactttgacctcctttgttgtcagcatcagatcagggaaaagctttgaaactttggttcctaacaaagcagtatgtagatgctaagaggcagtccgcccatgtccatcattcctgtccccttccctcataccatgtcaccctgcctgggtttttccagagaattgtcttgcagttccaggtttccattcctaggtttatagtcaccatcaagcttgttacctcctgactttcccagagtgatgtttccaactttagatctgttggaagaaagaagaaaggacaccctctctccctccatattctccccctcctgtagaaatttcttctgtccctggtgtattaactccgggcgagcgtagcataaatcaatcagcaggtagagattagtttagaattcaccagctgttcctccctgtaattggatgtaactatgcaggacaccttttgaaacagttatccagttactaaatgccagacctgtcatgggtcttcagctgactgcgacggattagcccctaaagagctagcgatttagcagcctgcatctccgccccctttgccagggagagcctgggaatgggctcagtggtatgctggatgcttctttcagcttgcagaaaagaaagctaagatagatcatagggcagggtttgcctttctttggaggaggtttttgtagcctttccccattcctcagcttcatacagtgagtgagggtctatggaagtgttctgtgcttctagtgttttttgtgttctctggcactgcttcctgacatggggtagctcctaggaaacacttgatgagaatggttttaggagaggtctagattgcagacagctgcagagcctcactgtagggctggtaggcttctgccttcagacagtcttggaaatgtgaggtggggttgcttatggcagggtcttttatttatttttcttggattactcactgcccattctctgcctctacaatccttccttttccatgtcagtatttctcccttgccccatgccttgaaggagagaaatccaagatcccagggcaaaacatagtcactaatcattctggcttccagctctagtgacccaaccctgtcttctttccctctgaccagtactatgacgacacctaccccagtgtcaaggagcaaaaggcctttgagaagaacattttcaacaagacccatcggactgacagtaggtcattttcctttcactactacccgtgctggggggaaccatggtggaaagggggtggtaacagggctgcagagaaaggatgaaatgactctgcctttttctttttttttccttcttccccttgtataataaactcttcagaatgtaatggggaggtgagtgtacctcacgcgggaataccatgctggaaggttggctgttagctacctgtctagtccctggatttatgagcctcacttgacaaatttaattgcagctctgcttattgtaccgcatccattagggcaggtaaatggaagtctgtaaaggtgaccgctctgcattttcacctccgaaggatcgactagtatcctgtctcatatacaagtagggaaataggtatagtgggcaggaacagaggatggtggttacagaagatacatttagactcccccaagttcatacttctcttctcctgccaccacccaaaaagtgcagatcatcttctggctttggaagtcattacaggcggcctcaccttagcccaaaagagctggatactaggaattcatggtaacgccttctttttttttttttttttttttgagacagagtctctctctgtcacccaggctggagtacagtggcgagatctcggctccctgcaacctccgcctcccaggttcaagtggttctcccatctcaccctcctgagtagcagggattacaggtgcacaccaccacgcccggctaatttttgtatttttagtagagacggggtttcactgtgttggccaggctggtcttgaactcctgaccttaggtgatccgccaggctcggcttcccaaggtgctgggattacaggcatgagccactgcgcctggctggtaactccttctttcctacttccttatctcaagccacccactatttttactttttttcccccaccaggtgaaattgccctcttggaaggcctgacagtggtatacaaaagcagtatagatctctatttctatgtgattggcagctcctatgaaaatgaggtgagaatccccacccctctttgctatttctgatcctactttctaaaccacaggcagtacatagccactggtttggggccctaatagagccgtgttcctctggcttctgaccaagctaatgaagttgtcagagatcccaccagcctcacaaacatggcccggcaaatgaatcgcctagaaaggaagttttcctagattaatcttttgcatccattaggaaacatcatatatgttttaatacctttccctgagtagtgttttttaagatggatttctgaggtatggtcaagactgcagggggatacttgcttcttctatgaagggtccatacctgactgagtttgagccaattagctaacaacctgggtcatgttgaaaccatacattctgaatggatcactggagaagaccttgggtatagtcctaacctgcttcctatatgcaggaaaagctgtttgcctcagatagcaacttctaggagaatagataaataaaaataagcccccagataatttgaggcaaaagtgaaagtttgagaaagtcaactcttactgagctcttattattggtataagtgctttgtaaagtatattgttatttaaacctcatagcacttctatgagttgtaggcattggtgcctttgttttacaaatgaggaaaccaaaccatgaagaactatatgaaattacttgtatgtgaccattgagaaaagtacaaaagtggcagttatctgatgtggttcaacctagtaactttctcagggtcacacatgtagaaaatggctcagcttggattccaacccatatctgtctgacttaaagtccatgctttttaaaaaattttgagacataggccgaacgtggtggctcacacctgtaatcccagcactttgggaggccaaggtgggcggatcacttgaggtcaggagttcgcgaccaggctggccaacatggcgaaatcccatctctactaaaaatacaggccaggcatggtggctcacacctgtaatcccagcactttgggaggccgaggcaggcggatcacgaagtcaggagattgagaccatcctggctaacacagtgaaaccccatgtctactaaaaatgcaaaaaattagctgggcgtggtgcgggcacctgtagtcccagctactcgggaggttgaggcaggagaatggcatgaacctgggaggcggaggttgcagtgagccgagatcataccactgcattccagcctgggcaacagagcgagactccgtctcaaacaaacaaacaacaacaacaacaaaaattagctgggcgtggtggtgggcgcctgtaatcccagctacttgggaggctgaggcaagagaattgcttgaacctgggaggtggaggttgcagtgagctgagattgcgccattgcactccagcctgggtgacagagccagactctcaaaaaaaaaaaaaaaatttgagacagggtcttgttctgtctcccaggctggactgcagtggtgcgatcttggctcactgcaacctctggctcccaggctcaagtgattctaccaccttagcctcccaagtagctgggactgcaggtgcccaccaccatgcctggctaatttttttttgtattgtttgtagacagggttttgccatgttgcccaggctggtctcaactcctgagctcaagcaatcggcctgctgcagcctccgaaagtgctgggatagagtcagagtctagacagggtctagacgttacaggtgtgacccactgtgcccagccaattaaagtccatgctttttacactaactctgaagccttcctctgacctcagctattgcttggttagtaatttctctacctaagacatcaggtaacacatatacagttggtgaagacattgtagaggactgtgacagggaagttctgtttaaacttttggctaaaagatgttgaattgtggaatcatgtagcagaatttatttctgtgagaaatcacagatccttttcctgttgtgctctcacttccactttatgtttttggtcctttgtgaaagcctgtgtcttttgatgtttaatgaattaggaggttttgtttttaggtagcagctttcagggccttgaaccttatccttctgcctcctctgtttcccaacagctgatgcttatggctgttctgaactgtctcttcgactcattgagccagatgctgaggtgagcaggacattcttttttttcccctcaagttatgatggaaagagcagggcattgttgatttctttttgggagataaagtaaccattcttcaggcccagggattgtaggggattggcaaaggctccagggagttgatttagttttagaagttgggttttgccgggctcagtggctcacgttcgtaatcccagtactttgggaggccaaggcgggcggatcatgaggtcaggagattgagaccatcctggttaacatggggaaaccctgtctccactaaaaatacaaaaaattagccgggcatggtagcgggcgcctgtagtcccaggtgcttgggaggctgaggcaggcgaatggcatgaacctgggaggcggagcttgcagtgagccgagatcgcgccactgcactccagccttggcgacagagtgagactctgtctcaaaaaaaaaaaaaaaagttgggtttattaattcacagtaattcatgctactggggaggactggatggagagtatgtccctcccatagaataattctcttactaagtaaggggactgggagggagccgaatctttacctctgtgtttactcttgtaatcccctgtggtcctgtcagatctgagcatcctcaaggtgctttcctgggcttcattcttgacattagaagtagggaaaggccaagcataaggaagtgtcccagatgaaatgtcattcagtacttcaggaatggaagcaacactcccaatttttttttctttttttttttttttgagatggagtctcactctgtcacccaggctggagtgcagtggcgtgatctcggctcactgcaacctctgcctcccaggttcaagcgattctcctgcctcagcctcccgagtagagtagctgcaattataggcacgtgccaccacgcctggctaatttttgtatttttagtggagacagggttttaccatgttggccaggctggtcttgaactcctgacctcaaatgatccacctaccttggcctcccaaagtgctgggattataggcatgagccacttagaccagtttttttttgacttctagtccttgttttttcccttctgtagaacaggaagcacccaggcaggaggactgcatgagtcgagttcaagacaagcttgggcaacacagtgagaccctgtctctgcaaaaaataaaaaaattagccaggtgtggtggtgcatacctgtagtctcagctacttgggaggctgaggtaggaagattgcttgagcccaggaggttgaggctgcagtgagctgtgatcatgctactgcactccagcctaggtgacatagcaagaccctgtctcaaaaaacaaaacaaaacaaaaaacaggaagcttctgccatttaccctctcctccctttccaccttcccactagccctctgttctctgttacccgtgtagatgggtaatagaagagatataagttacttttcctgaaaacatccagggctctgaacttcattcccccagcagctcccaagtgaacccagtacagacagccatccagaccagaacagcaggcactctcagccctgcaaaatcagcagggtgaatggctcagatttcctcaggaaggggatgatttatttcttatccaggtgaatgaatagtaattcattcgggtaatctagtgaaagactcaaactgacagatgtgacaggccacatgcaccaaccaacggatctgaggctggtgtatgcagaccctgccccctctttgggcttcttttcagggcctgagcagagctggtaagggatagggagaagagggaacagagaatgtctcaggaggtttgtcagagcttgagtacaaataaggtttgcattgaacccctctcacctccggccacctccagactgagtcttagctctgtttatattgtttttttccacccactgatgtcagtgtttatgagcaatgttatgagcagcatcatggcaggtaggaaagaaataatagcgtggataatcaacccctgaatagtcagaaattgactgtgttatttgaatctctttccatacattccttattcagcaaacgagtagaaaggggttttgagtgaactagctaaaaagttcttcaccttatttacttctttgtgtggttggtggagatgtttattggtctagtttaggttcctcaattgagacaaggtcctaggatttctttcacatacaagttggttattctcttctcttctcttggggactcaggaaaaatgtagaaaagcgagcactgctggagaacatggaggggctgttcttggctgtggatgaaattgtagatggagggtaagttctctgacctgccttgatcttgggtgaggtggcgggataactgcccctgtcctaagtcaagcaggctcagtggccagaggtcctgttccccgacagtgagttgggccttcgggacagagtgaacaatgatctcttctttgtttttgcagggtgatcctagagagtgatccccagcaggtggtacaccgggtggcattaagggtaagcaagaatgtgtttctttgcatccccgcatctattcacaaacaccctccagagccagacctgctggatgtgtccagtagttggggctcataggatacatacaaccttctctttttctttcaaatacattcagcctttctcttcccttctcttcttattgtcccaaagaaagaagcagaaataacttatttctacccctaatatggtgcctaacatctcatacagtctttgcacaaagtggacatttaatacatacttatttaataaatgataaaataaactttaatatttatggttttgaaattataaagcaacttgaagttggcttattcccttcttggagatggatccagtcatctgaggcagaggagtgtctgttttgtcttttaaagtgttacataggactgagcgtggtggctcacacctgtaatcccagcactttgggaagccgaggctggcggatcacaaggtcaggagttcgagaccagcctgaccaacatggtgaaaccctgtctctactaaagacacaaaaattagctgggcatggtggtgcgtgcctgtgatcccagctactcaggaggctaaggcaggagaattgcttgagcccgggaggtggaggttgcagtgagccgagattgcaccactgcactccagcctgggcgacagagtgagactctgtctcaaaaaaaataaataaataaaataataataataaagtgttacataactgaggatggtacctctccattaggaagtacttatttgccagaacctcagtcctctttggtgctggtgatatcagaaaggggcctctgagttaaccatagaaggccccaggtcagctgaggagataatggtggatgcagagagagcccaccaacaaattatacgggtgcaaagatgtctgagcaaagcaaatctccccattcacagaatgtcctggctctgacctccacagagtgaaggctgacagtgcttggtaatgggaaatctctcttaactgctgtgggctccatttgcatagtttaatcttctcctctaacatatgtctctgtgtggcaagagagagggtcccccccatcaactccccgctttgtcttcttaggctgctgttgcagcagtttatttcttcaaattaacatgctgtcgttacccatcaggctttgcgggatccattaaaccactcctggctccccctcatcctttccctagtgatactgatattcagaaaaggccttttctgactagggaatcaggtcctccacccccacgttaagggagttgaggatcagataacctgctggttactctgaatggagttaaatcttttaagaagtcctcctgccttaaaatggaagctggatgaaatgacccttttttgttcatagtccctctggccaagtaaaattgtagctgtactagtccctagaagggactgagaagttcagtgcatctgccctttgtttcagtttaaaggatcacttttttcttctctaataccagactccaatcaggtcttactccagctttctcccacactaaatgcttgtatctctgtgccatagggtgaagatgtcccccttacggagcagaccgtgtctcaggtatgactctcccttcttcctttccagatggactgggtcactaaagaggctagaacagcattccacccatacctctcaaatctgagtgaaactagagactcaagacacatcttccttggctccctcttattccagagaactgggactcatacagccagccactccctacccctacttccaactcctttctcagttacctgtgagcagtggctgtcagccttgctctgtacccttcaaaccctccctgcctgcctgatgcctcattcagtgatttattccccagcagaggcttgccttaagcagatggtctgtgtgcatttgtgcacacacactctctttctcttattattcaattgagggctaagctggaaatgcatattctagaatatgcaggttttgcagatccatcttgctaccttgactgcagatagattgtctacctgatgtagggggaagggaggggttccgttttctacccacttggaattctcaccaagaagtccatctggatttgttacccgccccctgcccgccgccccttttaacatatgtccagtaactccctttttttttttcttttataccaggtatacctcttctctcttcatcccctcagtgggtttgaatttttttggaattttccaaacaatctgctagggccttagagagcttcttcccatctctttacccttggggattttctattctccattcttctaaggacagggaagacaagtgaggggaaggagatccccagccctcatccttaccctgccctgtcagcaagctttcctcaatgctgctcttatctctgcaggtgctgcagtcagccaaagaacagatcaagtggtcactccttcggtgaagacctcactgttcctggctcttcatcctcttcaaaaaatttgcatgtctgctgtgaattttcatctagttccccaatcgatgctctcagggtcatctcggggatcacagggatccttaaatctccattctgtttgtggttgccccctcaacctcccctacacccttcctattctttttcattcttcttgcagttctgggagtaaagctcccagcatatttagataatagggcaggggaagcaccctctttctttctagactggattatgctcacatgctcccttgccctgacatttttgtaaattctgtgccctttgctgtagctacacttcagattaaagtaggagaaagaatgtgctgagtgttttcctccctttgcctctacctggccctcatcccaacagcccagcaaggggagagagaaagagaattcttttctatagaacgagtgggggcggggatgggtagggatttatccaatctaagccctaaccccacttagtgacctcagtgttttcttccattccttcttactgccctgtcctctgccttggaagaggctttgggaatagttcatagggaagggacaacatggaagaaacagcgatttaaattgtattgaacagggcatataaaatgcattctgtaccctgatctggcatatagcttcaaaactgcagtggcgagtgtccatctcttagttagctaccttaactgtccacccttactacctgtgggatcgttgcctggtttgtcttctctgtgtcctggagcaaagccagttcctaaaactaaaactccattctagtcttgggaagaaaagtttctactcagaactggggaaggagtggaacttatgacttgggcctctaggctgtctctgtcccctcagctccccgacatgcatttactctctgccgtgggtctgcagtcgctgcaacctaccctctctctgcctcagccttacacccaagcagtaggtctgtgctctccctgtctctaggtcgctgagagaggtgcttttcttcataaaacctttggggtttggatttccccaggaagatggagaatggaatactcactcttgggtctaatctttccccttgacccagaacttcctccccacaaaaatgcctttaaaaaccttcctgagacttaagcattctgccccacttactaactgccagttctccagcactgaggtggggcagataacggggcatatttaagggggcatctttgtgtaaaagatgcatggagtcaggagaaaaccaccttcataaactgctctgtgcaaagaggaataaaacattttttccaaactg

SEQ ID NO: 19 - DNA, 11329 bp, Homo sapiens
aagtaattcctagacccgtaggtggccgcagagccggttacctctggttctgcgccagcgtgccccacccgcaggacggccgggttctttgatttgtacactttctaaaaccaaacccgagaggaagggcaggctcagggtggggatgccctgaaatattcgagagcaggaccgtttctactgaagagaagtttacaagaacgctctgtctggggcgggcgaggcctctgcgaggcgggtccgggagcgagggcagggcgtgggccgcgcgcccggggtcgggggagtcgggggcaggaagagggggaggagacagggctgggggagcgccctgccgagcgcccgccaggctcctcccgctcccgcgccgcctccctctacccacccgccgcacgtactaaggaaggcgcacagcccgccgcgctcgcctctccgccccgcgtccagctcgcccagctcgcccagcgtccgccgcgcctcggccaaggtgagctccgcccggcccacgcgcccctcctgggtagtccccaggcccggacctgctgcccggggaaaaccctgcacccggcttcgcggggcgtccggagcaccgcggggctgggcggggagcggctggtggggaatccgctgctcagtgctccgggccacacccaaacgaggccagcagcgcccctccccggcccgggcgcggccgcccccagacccacgcggaccagaggagggggcacttgttctttaggaggggaccgtggtattggtgcgcctgaacctcttccctcctccctttatgtttgcgttgctttactcccacctttcctactttcccactcgtctctcgggttaccgaatccctcctacacgcccctgccctggctggcgtgtttcttggtgggttccgctcgcaggccgggtctgcatgttcgtagcctgctcccggctgtaccgcccaagtaggcgcgggtaggacgagtaggcagctggggcgtcccttccgtaacccttagtccgtcggccaaacaggcgtttctggtcggggcttcctgttgtctgctcgacggaaagggtcttcctgctgagggagggaggtccacttgttttctttctacagcagtttggctggggtttgtgggagagggccctgtgtgacgtggtttctctactgaaagggttcccttgctgtcttaataagtggaaccagaaagagatggaggaagagcaggcttgatgaaggatcttccaatcatagattaatttggcccggtgcagtgaaacagacagacgtgcctttggtacttggttcaccacctgtgctttggccgaaggaatggcgctgcccctagccgtggacactgctgcctgtccagcctcagtccagctctgcctaagtgaaaccaggagctctgccttgttggctggggtggaatgcagagcgctccaagccaggccagcacaggggagccctaagccagattctgggatgcattaagcccaccccgttttctgcccccacccagttccgtctctgcgggagcttctgcagggcgtggttagcacaaagggctccaggattctcccagtggtctgaggcctgtgactcagctgtgagaccatgtgggtgtggccggttgcagatactctcggtggatggtttggacagaacactccctgaaggaaaaggagaactgtgccatctcagagggcattttccaagaggaagtgagtcacacctggtctggctgccagtctgcaggagaggtttctcgactgaactgccggtgagggcagtaattagatctgcagggccttggcgagaccgcttttcgttatcggccagtatgcgcctggcagcctgcctcagccttacttgggaggtagcttttcccgctaagaggtttgcagttgttgcggatatttttccccagaagcttgagtttcagtctccaggaatggagttttatgttgtgcgttttaggtgaggccaggctcatggaaacacccagtcggtgatctttgcctccaacatgtttcagcaaattgcaaaagataatgccaggggttggagtgggaatgagttcatataacttattggaagtttcttcatcggccctgcccccacagattcctatccagtttctctttaatcatcccttccaaatggtgtatttgttccttcacagccagaggatagtttcttcactgtggcccttgatccaccatttggagtttcttatctaggttcttacaatttttttggtctactgggcatgaagcaatttttgggtcttaccctgctttctgggtgatgctcttcctagcttttctccgacacatcatataggcccctttcctcccgtgtgctggccagcctcctaagcagccactccagtgaggtcagggtggagctgagactgtgtgcctccctgctttctactgacagttcaaaaaatgtgacttttgtagagcacaacccacttggtatacccttggacacagtccagtcttttaaagcgtaaagttgagagaaacaatggaattctttcaggattataatgtataaattagcactcaaagtgctgagaaagctggactaaaattttaacatcttaagtttctcatttttctggggactcaacaaatttaggaatccacatcaaaagcaaaaagaaagaatgtacttcttttaaacaattttcagcactttctatccctttactaaataaataccacccatcctaccaaaggatttaactaaaagcagttttgacagtagctatgttggctgattaggctgatgcctaagcattctttaaggaaaaattgatgtagttggttagattgaaggaggtttcttccaagttctttcttcctattgaattgcatctgaaacgttcctttgctgcccagttctttagtgggcaagttttagttggtgagaggtgagagagacagcctggatccagatccattgcttcaactcattttttctgaattcccttcagagatcaaatttaagaatgccttctgggttcaattttaaaaactccaaaatttctaaagcaaaaggaaggaaacctcaaacatattttaaataacagatgtttgtttttactgacaccctgccgtttattttctgggtgggctgtaagaaaactagggtatggacaagacacagaggagcaaagcaagtccgactcactctgcagaagtgtcctctttgaaactgcagccgggatctgggcataggtccaaagcaaacatttgagatttttcaggagcagacacttttctgaggaggactcctgcttgtctgctactcgcaggacaaccaaaatacatcattatcaatttcttaacaattcatcgagcaggctctatgagggctggggcactggctattgggaccctgctcaaaaaacctgcaacctagtgaggaaagaaacagaaacacaaataactagaattcaggccaaatgctttaatagtattccattagctggtgaactcctcaaaggcaagcaccatggagagctttgtgtgtgtgtgcatgtgtgtatgtgtgtgtgaacaccctcatgcctaacaccatgtctgggacattcaaagtaggtgctcagggagggagaaccaaaaatggaaaattgaattcctcctaaggtaactaaatttgtggagtccagaattgttttccatagagaaaactatgcagagaaagatgtctccgcctcccttcttaagacctgttgctcagacaaacatgtagagggcatgtataggcatcagattagaatacttcaataaaaggtgagtggacagcaaggctgttattatcctgtggagctcagcagtgagatagcagcactagaaaagcaaaaagtagaagatgggatgaatgaaacacgagaaaatagcaagtgttagaagagaaggagcacagtcatgtcattctgactagacctgtttagcaggacacatatttttccttttgcgtatggaatgtgcactcctgtgtactctatctactgttccgttcatagttgaacacttttggggcccctttcctggcccttcccagctctcacatcgtcctcctgagctctgagctacaaggctttcagcctagtcctgggtaatcacacctgcacctcagctactgcccaagggattgtgtggttcatttatgcacataacagttatatagtgctccatgaataaaagcagaataatttgtagttcttaatcaagagaagcttaaatctcaggcagacaagtaaacaattaaatgaaattgaatgtttcaggtgcaagagtacgttattggggatagagaggacactgcagcccctcagccccagccccaaggccctcctgtcaaaatgtgtctaaccaggatgcaggaagcccacatctgtccaggaatagagcttgcagagtggctacgtgagggtggaaatgccagattgaagtccctgaagaacttcagttttggcagctagcagtgctgcagacagccctgcccaggcaagccccacccaagaacggagggccaggcagggctgactcagttgggcaaccattggctgcactcagacaagagttacatgattcatcctctagccaagagaacagagttttaatcacaacatttccccctttcctttgtcttattttaaagccagtgtgcaactccttccccaaaacagagttccttgctgtggccctggtcagtgccctttggggtactggttgctgaggagacaagggcttctccactgattttcaatgctattttcacctcctggctactccctcctctgcatccttattgcagaaggcctactggacacacagggagtcagctggctgcaatattcacaatccatccactgaataaaaccgctgggggaggaggggaggggaagaccaagtgggagaaggatgtaacttcagagaaggaagctccgtcacttcgtaatggctgtgggcaagagaggcatgcgactgagtgacttcagacctaagcactcacacagtgtgaggtagactcaccttgctctcctgaagaagatactcaagggtggccaggatttcctcagctgacaacttgtatttcttagaacctcctaaaattagcctttttaaaatttagaggtccttaccctgctgcattccctttcttaattctgcactttccttctgtcctgtcatctgaaaaaagtaaactaggtaccccacccagttccaatttctgggatctttgggaattgatcctgaagtgctctgctgctctgaacttgagcacaggtatttttaaacctctgtggtgtctgactcctttcctgagttatttaagaactggggtgggatcccacgtccttctcccagaggtgactcgcccagttcagttctcttaaattgctggacttggagtaccagtccaggcaaggcagactctctgtaagcccactgccatctgaaacccatatgagggatgggggatgagccagatctgagctgtgtcagaagagaaggaaaagggtgtggttcccctggaattcatctcacagcagaccttgaagcattaatttgcagctctctccaagataactaactgcctttcagatgactcatgccagattctgatttatagcattctttggcctgctggttcccatacttttctggagattaaggggtagaatttacaattcttaagtgttaattgctcaatcctcatgtttacccactccaccttctcctctgtaaaagatagcatttgagaatcagtgttgaacaggcatctctcagagataggaaccagaccaaagcatgtctcaggttcccattagagctcttcagcagaggaatttgccagcccttcaatctaagctcaaagcctattcttgtgattatttatttttattttttagtgctatattacagtctccattcacgttcacctgtttcctatccagtagtgattttaggtgatattagccaaagcttatctgttctcgccaaatgattccttccaattaagccaaaattcactgaggttctattaagtaccacgtactgggtcttgtgagacatatacccctagttcattatacccaaatgtaatgatctgacatgtttcctttcctttcttataaacgcttcatgatgaaagctcttgctttcccactgtaccccagactgtgagagcagctcatctgtctaatgtcactaaaaacataggaggccctcaaatgagttaggttatagtattacttgttgcttctcaagtgaactagacaatggactttgagtagttttctgtttgggtagagcaactgtattttactgccagagatgcaactgtctttattgcagtaaataacaagttcagagctttagtaaagaatacatataggccgggcatagtggctcacgcctgtaatcccagcactttgggaggccgaggtgggcggatcacgaggtcaggagatcgagaccacggtgaaaccccatctctactaaaaatacaaaaaaattagtcgggcgcggtggcgggcacctgtagtcccagctactcgggaggctgaggcaggagaatgccgtgaatccaggaagcggagcttgcagcgagccgagatggcgccactgcactccagcctgggcaacagagcaagactccgtctcaaaaaaaaaaaaaaaaaaagaatacatatatacccagcagataaattcatttgtaagcagatttctaaaccctagaatcacactgaaccaagttaccactttaagcttagaagggtgaagttttcgtatttaccagacttgactgtgtggattgttagtatcagccatatctaagaatcccatttactagtgccaagagaaattatgaactatctgttctttcagtaggtgctttgtcagttaaaaagaggaacactgggccgggcgcagtggcctgtaatcccagcactttgggaggccgaggtgggcggatcacctgaagtcaggagtttgagaccagcctgctcaacatggcaaaactccgcctctactaaaaatacaaaaaattagccggacatggtggcggacgcctgtaatcccagctacctgggaggcggaggttgcagtgagccaagatcacaacactgcactccagcctgggcaacaagagcaaagctccgtctcaaaaaaaaaaaaaaaaaaaaaaaaaagaggaacactgatgttgcttttctaaattattagtttctattcttcattagattattcatgcaaattagctggagttagctaaacccctttatttacagcaccagtatctgaggtgtctatttctaccaacaagggacccaaactggggtggactggttcttagattcattcactgaattttaaagctggagaagatcagatggatgatctaatctccatctttccaattatcctaaaaaggctggcaatacatatggcttaaaagttaatgtaaatctacaaagatgaacctggaggacgttacgcttagtgaaataagccaagcacagaaagacaattaccagatgatctcactcatgtggaatcttaaacactgaatttcatagaactaaagaatagaatgggctggggtgattgcatttgagtgatgttgaggagctattggtcaaaagattgaaaatttcagttaggaggaataagtttaagagatctactgtacaacaacgtgactatagttaattacaatgtattgtattcttgacaaatagttaagagtggctaagtgttctcaccacagaagtgctaactatgggaggtaatgcatatgttaattagctagattcagtcatcccacaatgtatatatacctgaaaacatcatgttgtacacattaaatacatacaattttatctttcaatttaaaaaaaataaattcatgcataaagtctgccaaaaaaagttaatgtagaccctgttactttacatcctttaataggcttcaacggaccacaccaaaatgccatctcaaatggaacacgccatggaaaccatgatgtttacatttcacaaattcgctggggataaaggctacttaacaaaggaggacctgagagtactcatggaaaaggagttccctggatttttggaagtaagtgttgaaaagcttacaaagaaccagacataaaagtcaatgcttctaggccttggttccttttccttcttgtttccatcccttccctgtggaggtcaccactagtgaataaatgaatgtagtcacctgaaggaatgaatgaatgacctcattcattcatttattaaatagtattgagtacctgctatttgtaagatactgttgaggaaacaaagtaatgaagacacagccccaaccttcaaggagcttacagtctgcaggtgaaataagactgcatacaaataaccacaatatgagctgtttgttggaaaattccatcgggttatctgtgtctgttgtgacgatgttggggacagagttgggagaaagaaagcttttcacaaaagagtagtcaaccagaaaatggctaccttcaggtccaaaaacctggtggtggagatgccacatcctggtcacattccattttgagcaactcgaatctcccttcttaaatctcttcagataaagggattgttttttctttttctaatactacaaaggagcagtgtcagtcatctactgaataaaagccacatatcactccagaaataactgcttttcacataataatgctctgacagcacaggagcagtttgaatttatgtctcacctttgacagactgagagatgcatgaagacctataagaggactctgccatcagctcagatacatcactcaggacatggggccacaaggcacagttgtccttttatattccaggttctcgagaggtggctgttgaattcaactgaaggtgcaacattgcatgacaaaatagtagactgaaatgcaagcccttctttccctaccacaattgtagtcacctgaaaagattgtttctgtgcttggtgttgaataatgcattaacctgtaaagggtgagaggagatacggtaaaacgttgggtcctgcctcttgtcatctgactggtaaacggcacattagtccagcccctgactcctgcaatcaataaacatgaggctttttagtatactataattcgtatgtcatcaatatcagttaaataaacagatataaatagcctaactgctctctcagagctgcagttattacctaatgctatcccagaatgagttagaatatgcaggtcctctgcttttgtagagtcctgtgatatagccccagaccaggagttagaagatctggctctgccttaactaacaatgggcaggttgcttcagctctctagtcttcagtttcctcccctgtaaaattagagagggctggacataattatctgcaaggtcactttcactttctatgatcattcaagacaagcattaagatgcaaggacaaaatgtgctcattgtaagcctgcctgtcctatagacaaaggcattctcagtacactaaacacttgttaagagtgttgttaagagccagagtgagtatcatgtaagacacagaccctttcttcctaaaggctttgtggcatcagacacataaagggtatatgtagtgtggagcactaaccatggcagggtaatttattccaggcacagagtcataattctggaaacatctagactcactgcattaacagagcattttgtttctaaagtagacctcttatgtcatccagatttcactcattctgaccacagccaggaagctgagggtgaagccagaattagctgaaacccaccaagagctgcatagagcacgtttagctagagtaggagtttgcagtgctcatgtgggaaatgctgctgctatacttttaggaatttctgagtgcaatttagaaacatctagcacacttgaaacactgcgtatcattttcctcactcatgaatatagtcatcagaattcataaatagtttacctgagccctttaacaacctcaaataggccatatttctctctctggttgatggcatggaccctacaggaaaaaccacaccttaccgcttctgaccagcatcactacaaaaaggagtgctgaagccaatcaccatgtaagcaagataaaagcaaagggggtcttgcctgcccatctctgttccatacattcttaccaggcactgagagtcatggggagtttaagactccatcccacatactccttttgaaactggtccagtgtacaacatccagtgaagagtataggatggcatagacttaccaactcaaagaatgaaaggattctagaaacattatagtccaacctcctcaattcatcgttgatacacaaaggcccactaagctgtgtggttcactcagcatcacgtggctaatatgatatgaagccacactagcttgtcctcagctgtgccaagaatgagagctgccttctccaaacctaaaaccaacccatggcatcattaacacctctttaaaatccataggacagtgatccaaaacttattccctaaatcataaatatcttttcataaggagtttcctttgtaagggatttgaccatgccattaggaataaaattttaataagagaatgtaagtttaaaccataaaatgaggagcttagggtggttcttaggcagaatctaaatatgaaattactgaaatgctcccacaaggcaaaaaaaaaaaaaaatacatttagatgaactccaaaggttgcttatgacctaaaacaagagctcaagtaattgggagatatatacacagttctcagcagtacaaatcaaataagctcctcattgcaacctttgacttctatttcttgcctttgttcttttttttttcagaatcaaaaagaccctctggctgtggacaaaataatgaaggacctggaccagtgtagagatggcaaagtgggcttccagagcttcttttccctaattgcgggcctcaccattgcatgcaatgactattttgtagtacacatgaagcagaagggaaagaagtaggcagaaatgagcagttcgctcctccctgataagagttgtcccaaagggtcgcttaaggaatctgccccacagcttcccccatagaaggatttcatgagcagatcaggacacttagcaaatgtaaaaataaaatctaactctcatttgacaagcagagaaagaaaagttaaataccagataagcttttgatttttgtattgtttgcatccccttgccctcaataaataaagttcttttttagttccaaatttga

SEQ ID NO: 20 - DNA, 173143 bp, Homo sapiens
ttccgccggcgccccctcccccgcggcgccgtctcctcctcccgcctgaggcgagtctgggctcagcctagagctctccggcggcggcgcagcttcagggcagcgcgggctgcagcggcggcggcggttagggctgtgtagggcgaggcctcccccttcctcctcgccatcctactcctccctcctcgtcatcctcccccttcgtcctcctcgccttcctcctcctcgtcaggctcgacccagctgtgagcggcaagatggcggcgcccaggccgccgcctgccaggctgtcgggcgtcatggtgccggcgcccatccaagacctggaggccctgcgcgcgctcacggcgctcttcaaagagcagcggaaccggtaacgggtccggccggggggctgccccgggcaggggagggcggccgggactcccgcggcggccccggcctggacccaggcgccgcccccgcctcgctggagacgcggagggcgaggcctgcgcgggctgcctgagcgccacccaggcctcccgactcccaggcaccgcctcgtgctcgtgggtccccgcggggcctggggcgggcgccccgctcccccaccgcagccagtccgggtgcgaagccgcgatcccgggagcccttgccgcggcgtgccggtgatgttgacccaacacacggttaggcctcccctgtcatgtgcgagggctgcgccaggccctggctgcaagacccacgcggcccccagagtcataaagcgtgtgttttagcgggagagacccgtgttacggacgcgggaattgggcagttgcggggatggcagtctctaggcatggagtgggactggcactcctttctcctcggcgttagagcccaggctgcaccatctgccctgggggcagcgctctgtgcagtgtggaagagcacgggcctggagagaccagtccagtcctgatgccactgaggggcaagatagccaggcaaaaagagaaggtgcccaggagtcgacagttgtggatttggttcctggccttgcaagctgcgtgttactgtgcagtttctccaggccttagaattcttgtctaaaaatgggactataatacacagcttagttgctggattgtacagaggaataaatgaaataaagtacgtgaaaatataaaatgtgcgaagccctcagtcaatgcttgtttgatcttgttctgtcctctgggcctcagttttcttgtctatttaatgggagtaaagttgaacagtacctccctggtgatagtgtcataaggagtaaatgagatataatgcatattaaatccttaggacatacctgtacatagcactaaatgtagctgatattatcacttaacacattgattggtagttacccatgtatcagctattgtgctaggtgatggggtaggaaaatggaaagtccttgctctctcctgtactagtatgtacaagataacacagctgtgggggtatgtatgtacaaagcagagggaacattgaagaaagaaatactgagacttgggtcagcctaggtgatcactagaggacttcctctctttaaactagacacctggtctgagcacttcctttacctcacatcactttgggaaatgtggagctgctgaaggaatgctattaataaaagtccctggtactgctctatgggcctttgggggagatgtatttattgatttaatgcttaggcatttctgtatcatgatggaccctccttttagttaataacccagtcatcaaccatttattgagcacctactatgaaacagatttttttgttggggtctgagggtacagagaggaatgatgtgagtgatcccttttatcaggcatatttgggaaatagctaaataaacacattgtaatggaaatctatacaagaggtggtggcacaggggagcatgtggatatgttggaagattggcgagccaggagaggctttttaaggttatttcaggtgctcggttatagatgagaggactagagggaacagtgtctgcaaaggggccatatgttaattttgcaaaaccgatgagacaattaagtaacatagataaggtttctcgtacagaagagacatttagtcagacatcagttccctttttataacttggagaaaatccaagcccctgagccagtttagaaggcccttcttgactctatctcttgtgagggaagaagttacagagaaccattgatggtttttgtcaagggagtggcgcgataagatctgcctgttagatcttcctggccgcctccgcctccattgtggggaataaatgagaggacgaagctagagacaggggggacctttaaggagtggtagcggaagcccatgtgaaagagaaaagtgcctaaattaggacattgtggggatgagtagaataaatactgagagatacaaggttgaatggacaggactcggaccagttggattgtgggggggagaatgaggaaatgaggatgcttcccagatttcatctgagttctgggacagtgtccttgttccaggcagagattggagaccaggaaaggtgaactgatgtgcaggtcctggcatggaaagacacagttgtgtggtggtgcagagaactcatgatcagggtttataaggacaggcttctggtcctggttctgtcactgcttctctttgtctttggacaaattataagggtcttgtggggctgggcccagactcctgctcctctgagaggatccctccagttctgatgctcagggagccagtgtttgtccttgggggtctcctcttcagagaggacatagggctgttgtctagtatgaacaggaacacagatggatccagggggaggatgggccaaggtgttagaaggtggacgagacaaaaagccaggcaaaatgagtcctcagtgtagcaaatagaaaacagcagacaaaaagcaaaaacagtgaggaaagtaattaagagattcttctcttttggtggaatacattatttctctaggattccattttatatttgaagaatcatagacataatgtagttggtggtccttctgagctcttccatgctacaaaacaaacttctgtcagtggtagcttgagtaatagaagtgtcatgcagtgggaagagcagtggctttggaaccatggagacctggatgtgaatcctggtttagtttgtgaggcttcttgtttctttccttgaaaacgggatgatggtagccactttgacagattattttgaggatctgtaatattatatgtgtagcatagtggtttatgcatagtaaatgccatttatttaggacctgttattaaaatataacaaggttgtaagtgaccaagaatccatttgtgttgaatctcctgtcttatcagaaacaaaaattgcagctatttcaggaagacagttctaattttggggtttccggagaaggggatctcaggatctcattacaattttagcagcccccaagtgaaaagaaattcttacatcccattgtgggaattttaaatatgtccacaaattctttgatactctgaccttctcaagaggaggaggttaattcttttctccttgagtgtgggctgaacttagtgacttgctcctgaagagtagaatatggtagaagtgacagtgtgcgacttctcagactaggtcataaaaagcatcgtagtttcctctttgctagctctttcttgaatcacccactctgacaaagccagctgccatgtcatgaggacactcaagcatccatatgcagagagctgtgtggtgaggagctgaggcctcctttgaacagccatgtgatgaactaccttggaagcaggtcctctgagctccagtcacatcctcagccacgtgtgcaacctcatgagacaccctaagcctctcagatctgtgtgagatcataaatgttattgttttaaaatgctaaattttgggctaatttgctatgtagcaatacatcattaatacaccagtcttaattctccatgctgtgtattaaatgcattctgtaacccacttcttaaacagtgtcttggtcactaaaataatttaaacatattgcttatggtcatataatatcagtattgagatattcctcagctgtttcttctctgtgtaagataattcttttttctcacatttgttttatactttttgtttaatgtagatatcaccgtatttcacatttgtttaacaagtgatttatcttgctgtgagtctttgcaagtcatgttaaattctttctgaacaagtaagacaaacatttaaaattctattttagttgctcctttaattatttttcttttttttttccgagacagggcctcactttgtcatccaggttggagtgcattttttctagagaagggggtctcactatgttgcccaggctggtctcgaactcctggcctcaagtgatcctcctgcctcggcctcccaaagtgttgggattacaggcatgagccaccgtacctggctagttgcctttatgatgcatccatgaggcatctccagaccccacaaagtgtagagccaggtgagatgggttgtcatactccatctgtgctgttcattaagtagccactagctacatgtagctacttaattaattgaaaataagtaaaattaatgtttcatttccttagttgcattagccatattttttaatttgtttttttttttttgagacagtttcactcttgttgcccaggttggagtgcagtggtgtgatcttggctcactgcaaccttcgcctcccgggttcaagcgattcacctgcctcagcttcccgagtagttggaattacaggcatacgccaccacacctggctaattttgtatttttaatagagacggggtttctccacgttggtcaggttggtcttgaactcccgacctcaggtgatccgcctgccttggcctcccaaagtgctgggattacaggcatgagccaccgtgccctgccctttattactatttttttagagacagggtctcactctgttgcccaagctggagtgcagtggcacgatcatagttcactgcatcctcgacttcctgggctcaagcaatcctcctgcctccttccccagtagctgggactacaggtgtacaccaccatgcccagataatttttttgtttattttttgtagagatggggtctcgccatgttgcccaggctggcattagccatattttaagtgctcattggccacatgtgatgtgacagcacagatatagaatatttccatcatcacagaaagttctggaaatagtgctcttctgtagtaagttttctataggggagattgtattttgactcttgagtattcttgaaataatggaacatttggatgctgctttctataaattcatctcatacttaaactgatacctcattggtcttccacctgatgagcttcttgaatgaagtgggcacatcacattcactgtatgcctggcatctagcatagagttgatagtggcagatgcttatcagtttcttgtggagttgctgctatttctataacttattactcattgcacttgcttggtctttttcttagtcgtgtagacagtaattttttttttcagcttctatcagtatagctcattttttctcttcaatctgcttagacaaaatgaggttttcgttggtgtttaatttaaaaattaaaaaaaaattcaggccaaaaggtcttaaaaaaaaaaaaaagaaaaggcaagtcctggacttagagaagtatttaaaatatatatgataaagaagttgtttcagaatatatgaagtactcctacctacaactcaataaaaaagactcctacaactcaatttaaaaattgggcaaaatctgtgctttacaaagaaaaataaaggccaataagcgtatgataaagtgctccaaatcactagttattagggaaatgcagttaaaacttcagtgagagactactgcatgccgtttaggatggctattatccaaaaaatggaaaagaacaagtatcgttgaggatgtggggaaatgggaacccttgtgtgttgctagtggacatgtaaagtggtgctgctactatggaaaataatttggtgggtcctcaaaaagctaaacatggaatatgaccaagcagttttactcttaggtatgtgcccgaagaaaatgaaaaaggacaaattctgtatgattctgcttttatgaagtacctagaacagacaaacttgtagagacagaaagtagattagaggttactaggatttggagagaggggaaattgggagttactgcttcatgtttacagagtttctatttgggtgttaaaaaaaattttggaagtagaggtgatagttgtacaacattgtgaatataattaaagccattgaactgtagacttaaaatgaacaacatggcaaattttatgttatatatatgtattttaccacagttaaaaaaattaataatacaatgtaccaaaatccatttaattgtacgctttaagtgggtgactttagtgtgccacgtgaaccctatctcaatagtgctgttataaacaaatccatagtaaggtgcctctgcatccctattagaatggctataatgaaaatgagtgacactgaattttggtgggcatgtgaagctatatatttatgatttttaaaaagtcacattgtttggagtagaggggatgtgtttaaaatgtgaactcctccctcactgctatttttgtttcataataaaatagccttttatgtatctttttccctactcagtagtgcctttcttgaagggagggactttatggtgtttcttagcagggtgcctggcccattttgggtactctgtaaatgttgaactgaactgaatagagcaatgaagagccagtagctccagtgagccaatcagtaattactcaaattgctaaaatgctattgattagtttaccatgtaattcattcattgactcacaccacacatgatacatgtaagatctgtgcttagtgctgcagctgtgattgataggataaaattaactatgtgtagcttactttgaactactgacataggagtagctcacatgctattaaattattaaatttaatacatttgtaatttgctaaaaatgtatatttgtaatttatatttacaaaataaatttgtaaatttgtaaatataaatgtcttaagccttcattcctttgcttatacacactcttcattttccctcaaggttgagttaccatttcacttccttttgaaagccgtttctgaccttcaggtgcttttgccctgtattcccttggcactctgtgcttacctctttcaaagaacttcacataatcacttaattacctaccagtctcactagagtgagagcagcccgaggccaggactcttatttacctctgttttcagtaccaactttcaggcctaccacataatgagcatccaatagtatttttattattttcttgaacacctgattttcttgagccatgagagagaaaatgagagcatacaagaaagactttaattaggaggggacaggaaacgttaaatatgacagatgactgatttcaaggggtaaaaaatgacttggtattgttacttggttgtataaatatgttgactaaccttcataaagaaagtgaatagattaagcactttagaggtcaacataccacagaggtaaaaaataaacctatccatctgtgtatacacacgcacatggattttccccggacattactgagcctctgggcagcaagtgtctttaactacaccaaaacacacaaaaacccaaaaaacaaaaacccacacgagtcgtcagcttggctgaggacgccatatggcgttttgactcaaccatgattcagctcaactttgttgagagagaacatcaattaagttacactataaaaagcatattttagagtgtgctggcaatttcctttatttttacctatgccatgagctggaatgctacatggaattgtttggtaaggtgttctgactcagcttcaaaatacagaagtggtcagtgtgagccacctcatacattcaattatcttaaatgcatgaagtagacaggaaagagtttgagccagccgaaataaataaaaccaatcgaaataaataaggttaggattgtgaccaccagtaccctcagagcagagtttctcagctctttcattcttccagtcttttgtagtggtcactggacccaagggcttggtcactggactgtgggcaatgacactcaaaagcaaaggaactgtgggactaccagtagggtgagctgggccctgtgatggccacaagcttagagaagttattagagttaacgagatgatccataagtgggggatgctctttcattatagctattgaggagtttgtgtactgcttagaacagtgtctggcacctaatagacacagtttaagtgttagcgttttcgttgttggtgtcattgtcatcatcatcatcaatgagaatattataaaactatcaaaagacatttaaaaagacttaagtggtaagatacaccattgtattataggaaacctcaataacaaagacatcaatacctcccaaattgacctgtggattcaatgccattcataataaaattgcagcagggtttttgctagaaattcacacagattttctaagttatatgagaaactcctaggttttctcttactctctgaactgtcatccctttaaggcttttttgtttttttgagatagggtctcactgtgtcacctaggctggagtgcagtggtgccatcacagcgccaccatgccccgctaattaaaaattttttttttttttggtagagattagctctcactatgtttcccaggctggtcttgaactcctgggctcaagtgatcctcctgcctcagcctcccatagtattgcgattacaggtgtgagccactgttcctggaaccctttaaggtttttttacatgaatcctcttctgactccccagttcttaagatccttctctatgccctcagcaaaattccctgtatcctgaacttctgtaaacatccattcatcttcttgatctaaatgaaatatggctctgaggacatgcctttcccagggttcttgaaagtgggaggctgttttctctcctgcactcagtacaatgcttggctcaaaggtgtggtagttctccttgattgtcattgctgctttcagacctttttcctccatagaccactccaacttttaatctcatgacatcagagtatcccttgtttaatcacttttgtggttaaaagagacctttgggtcagtctgcctcattccttgaagagtttagccctggctcacttttcactctatttcttctcctgtcttaaatcttcgttatttcattgtttatatagattttcctttcattatcctgacctcgaatttctttgactttctctcccttagtgagcttgacctccatcccatctcagacacacattgccataccttacttagactttatccataactgtagctgccttcccccacaatctcgagtcccaatccctgttttatcttctctttagggcccttgcttcatcaagtctttaacctcaccaggacctacagtcttttgaccctatttcctatttactaccccttttgtttttcattccccttcttaatgttcacattcccatcttgatctggcttagatccatggatgagtaataagagcattttttaatgtacatcctcaactccactgcctcctctctaaactttgttatgtttgcctggtaaaactccagctctggtcaaatccaacttgttacctttgcgacagtacccaaatagctgaacaaggctagagaaaaacatacagccgtgcagactgctctcactttaacttgctgatcactaactaacgtggcccttaatgctacctgtcagtcccgctgtttgccctggtcccttgactctcctgctccccgagtcaggtatttcatgctccaccctcttcaaacctccatcccatctccctcatcctcactctcagctctctgaaaataggagcaactagaagataatttccaggaactctcatcaccctctctgcccacctacttgtatctgtgcccgtagcctgcctttgcttctggtctgtggattagcgatcttgctctgaatatgagctccccttaagtttgcactaaattccattgccttttgcacacattgctccagcagtcttcttctctccccccttaaaaatcatcagttttaccctttctattggattgcactcatcagtttatagatctgctgtaatttttccatactaagaaaaatctctccctccatttccctgagtgataatccttcccggatctcagaactcagtcctcagacctcttctcttttctgcctatatttactttcagagtattctcactcaatcttgtggctttaataacttccgtttgctggtgactaacatttttctttagctggacttctttgtttttttttttgagacagggtctcgctctgtcacccaggctggagtgcaggggcacgatctgcagccctgacctcccaggcataagcagttcttccaccccagcctcccttgtagctgagactacaggcatccaccaccacacccggctattttttaaattttttttgtagagacagggtcttaccatgttgcccagtctggtcttgaactcctggcctcaggtgatccacccaccttggcctcccaaagtgctgggattacaggcatgagccactgcacctggcttagctagatttttctcctgaatgctagacttgtttattcacctgactacttcacattctacttgtatttctactgatcctctcatccaccagatatcctcagagtactcttgtttctgtaaacaataaatacatctttcaatttatggctcaggctaaagttttgatgtcatccttcactccccttttttagacaccctcataagaatccatcatcaagtcctattggctctatctttaaaatatccagaatttgatttctgtttaccgtatctgctgctttccctctgctccaaaaacagccccctaactggtctcctgctgtcgtctctttctccctttaagattgattctttacaaagcagccaaagagatccttttaacatgtaagtcagatgatgtcacccctctgctcagaaccttccatgggccgggcacggtggctcacgcctgtcatcccagcactttgggaggccaaggcaggtggatcacctgaggccaggagtttgagaccagcctggccaacatggtgaaaccccatctctactaaaaatacaaaaatttgttgggcatggtggcacatgcctgaaattctacctacttgggaggctgaggcatgagaattgcttgaacttgggaggcgggggttgcagtgagctgagatcctgcctctgcactccagcctgggcaacagagcaaaactctgtctcaaaaacaaaacgaaaaaaagaaccttccatggcttcacatcaggataaaagccagcgtccttccgtggcctactgtgcctgtccagggtggctctgtcttgtctctctgagtcgcacttctcttttctcactggggttcattgaagccagccctgacttccctgtgacgtgctctgtatgcctttgcctctagtccaagctcttctcccagcaagatgcatagttggctccctcaccttctttggatctgtgcttaaatactacttttaaaataaggtttaaataatatcttatgtacaaaatctttctctaagcatgtaaagacattctccttatattttcttccaaagccttgcaattttgtcttccatgtaattcctaaatccacctggagttactttttgggtagtgtaagtaaggatccaattcagtttttttctttttagattaacagttgttacagcacctcttcgagcacagtccatcttccccaggtctttaatgctattgatagatgccatttaccaagttaccatgtatacacagttctgctcttgggctgtcttttccagtggttgactttctgcctctgtgctaatttcaccttttcttagcttctctttcattttcttctcttttcatgttttcttagagacaaggtctcgctgtgtcacccaggcctgagtgcagtgttgtgatcatagctcaccatagccttgaactcctgggttcaagcagtccttctgcatcaggctcccaagtagctgggactacgaggcacagaccatcaagcccagctaattaaaacaagtttttttgttttttttttttttgtagagatagggtcttgctatgttaggcaggtcttgaactctcctggcttctgcctctcaaagcactggaattataggcatatgaaccactgcgcctggccgccttagttcctttcatttagcacagtgcgtttgttctgatgaaagatgaattttcaatgtgatgaggacagtgggaaagaggaagtgtgtggtttttggggagtggggagaggactggtatgtttggagccctttaaagcaggggttgccagaccatggccagatctggcctactacctgttttttttatgacccatgagttaagaatggttttttacgtttctaaatggttggggagatgataaagtttcatgacacatgaaaattatatgaatttaaattttagtttccacaaacagtttcattagagcccagccatgttcacttgtttaggtgtttcctgtggctgcgtttgtgcactgggggagttgagagtgtgacagaggctgtttggccatcagagctggaaatattcactctctgaccctttacagaaaaagtttgtgaccctgcaaaatggattggtctgggttgtcaggacggcttcggaatcctggatgtgacagaagaggagagaagagtgtgaaaagaagttttgagttctgcgcagatttcaaaattttaccctaggctgtttgtggcaggagatacagatgtttttattttctgtttttgttcaatcctgcccagtcaaatcagcaagattatggttttagataacaaccagtgattgttgttttaatctgtgaacttgtgtggattttaatagtttttctcactggcagttgttaaactactctaaaccacatatgccagtttttaagtaaatctaaggtattagaataaatcttttaacaagtatgaaggtcttagttgtagcattacaatgactagcatgtagcttttttttttttttcagtaggaggtcccacctgatgattgaactgtaaaatgtgtgtgcatacagtatattagacctatctaacctgttacatataatcacaggtagttttctttaattttactcaaacagaacttgccaagattaaaccctacagatctgttcaaacttgagggaaatgaaattctaccttttgtataattcaaaggatttttttggttctgtaatgtaacatttcatttatacattgtcttcagggtatgcattcctttgtaataggaatgtctaacggttgaattttaattgtccttgtaagtactttccgccttctgtgaatgaagtagctaagctttttaaagtcgctgtacattttttgttagtttggttaaagcagaaatgacagcagttattattaataacttttgtaatattggagtgattgatctttactatttcattgtcgttaatcattacacatatttagctgcattgtcttgacagtgaacgtagattttgcagacaagagtatactaggactattctggatctgtaatgccaaatagttttctttcaaggctgtagagaaggtaaagatgtatagaagagttaaatgctttcatagtatttactgttactgaataaaagcttctttgtcctcatctgatgaaagttgttgacatattatattgtataaaaatatggtgaatagaagctatagatatttattatatgactctagaggaagagttttactgacaccatttataaaaggaaacacatctaaaacatgttctttgctcttaagaaatttaaaatacagttaattgggttataactcctcccagaccctcaagcttatccactgtatcatttaatgggaaaggagaaattcgatgtttgcttaacagcagtcataaaatatctatatgatattcacatcttaaaatctgacacgtttttaagtttctgagtagagattatatggatttcttaatgggaaagggagggttgagctgatgcctcactttcccctttctgttgctgactcaaagggtactgatttcactgcctatgtcaggcttgattcctggctctgagcacaagctctgtaagtgcttggattacatagcaaggctgtgatgcagtcaggggccacttttgagtgtgcaaacagtctcatcactgtttaaaacttgaacaaattcaattaatgggtgccaattctgggccctagagatacagaaaagaataagatagtctccatttttcaaggacttaacagtctagccggggagataggttatataaatcttatctgatgtggacaagttattccagtcttatgaacagatctccagggcttcatagagggagtctgtttgtctggaaaagtggaggagtttctccaggtctgagtttcccaaaggtttgaaaggagatgcaggccaggcgcagtggctcacgcatgtaatcccaacactctgggaggccgaggcgggcagatcacgaggtcaggagaccgagaccagcctgaccaaaatggtgaaaccctgtctctactaaaatacaaaaaaattagccgggcgtggtggcatgcacctgtagtcccagctactcaggaggctgaggcagaagaatcacttgaacccaggaggtggaggttgcagtgagctgagatcacgctactgcactccagcctgggcaacagagcaagactccatctcaaaaaaaaaaaaaaaaaggagatgtaagtttctcccaggcagaggattgggagatttggagaggactttcttctggtggtgagatatgtttgagcaaagacagaagattggcgaaatcgggggttttcaggaatccatggtttacaacctggggagagcatatgacagtgatcacagctccacattattttttctttatactgcaaacgcgaattattgtgtgccaaatagatgctgtcatgattactctttagtcgctattaatagttatttggatttcaggaatgttttggttggccttagctcagttaaatgcttttcatttggttaaaattattataagggcatggtgcatatataacaaattaccatgtagcattgggaattattcacaacatagttcatgaacttagtatttattctatggtcgggaaatcatttttcccattttctttaagaatattgcttttcttctgtcttgtttagtctgtaccatagtttgattccaaagcttttgctgtgctagataccaattttgagtaaaacagatgttacgattgcaaggaatgacttcagggaagaccattcacgggggaaaggtggttcccatataagaggcagacggcaaaggatcaggtgaaagaaataattctcgctgctttcttacagctgtaaatacacattcttagtcatctcagtaggaaaagagaggcgttattgaagcttattcaagttgcagagctctacttttacttgactatagcattaaataataaatggcttcaaaacttcatgcagatggggcaaatagaggtgattagttttgttctttgtcctagaaattgtgatcagccttagcattcttcatagtgttttaaactcctggttattttcttagctgatgagtgtctacaatatatttggtactccttaaagctaccttaagaatgttagtgaatcggccaggtgcagtggctcacacctgtaatcccagcactttgggaggccgaggtaggcagatcacgagatcgggagttcgagaccagcctggctaatggtgaaaccctgtctctactaaaaatacaaaaattagccgggcgtggtggcgtgtgcctgtagtcccagctactcgggaggctgaggcagaagaattgcttgaacccaggaggcagaggttgcagtgagccaagattgcaccactgcaactccagcctgggcgacagagcaaaactccgtctcaaaaaaaagagtgttagtgagtattcttccattcttcttacggcaatgctgtcactaaaaaatggcttatgtacttgtttcatacagtttattgaggcaagattagtgctgtacccttgaattttcatttcttaatttggtcactcagttgccgagacactgagtcaaagtttcattatttacactcagggctgactgggggagacatagacaaattattttatgtgcagtttcccagtttttaattaatttatactctgcctctttcaaaaccaagtttgagataccttaaaaaataaatacgagaaaaagataaggggggaaattaggggtagtggaaaagccagatagaaaaagtaaggattcatgttgtttgggtcataaatttgactccagacttaagaaaggccccgacagagagaaaacataataaataatgtgagttctattgtctgttcgtaagataaaaacacacatcacttggtgtataagaagccatggtactgaagttcaaggaaagacgtgtttcctctgcccccggaaaaggggcttccataggtgtcttctgcggcaactgagcagctctgtaacctgggcagctcagtgtccagagttctgaatgaacatgtggctccctgctggtctggctcaatccaagggtgaaaggtagggcactgtgaatctacagcgagagcagaaggagaaaattcatatggtctgaatcatttggcatttatagaatctcttaaattgtccaatgtggcaactttccttctaacgttaaaagagatttgctgtttctttaggggatttatggaatgaggaagttggcttgcatttaggtgcaatgttgcacaaaaaattcttatctttagagctctggaatgatagccagtgcaggcagtactcctggcatgagaggcacgcagagactgagatgcccagagggtacaaccacaggttcatctttctccctgggcatacattcttggtggaagaacaggcacactttacattctccccctctcctttctctcccatctatgtagttgactgtagaagtttggtgtgtgtgttgtcagcctcactgtgtctacagagtagatagtatccttgtcctacaggaatattgtttcttataactgaacttagctacatattgggtgacagaggaccagaatatattctctgtctagaacattaaataaagatactctgttctgattcagggtagatccataagcatgagcagtcactggaactgggatttgggttgtcatgggtagtggaagtgctcaggccagagtgcttcacttggccttgtgtctctgccagttactggctgagtgatttgtgcaagttacttaccatctctacttcacttaccttatctgtaaatggagaggacagtgttggcctcataaggctgttgcagagactgagataatacatgagaagtgacaagaacagtgtctggtgcatagtaagtgctcaatatgtgtagatcttttatttggtgttgtaaattaaggagctaaagcagataaacgtagcgtacctccccacaatagtagataaaagcagttttctgaataggacatttggaaatcataatcttttttttctgattcgtgataattttatcctttttcagagaaacagcacccaggactatcttccaaagagttctggatatcctaaagaaatcttctcatgctgttgagcttgcctgcagagatccatcccaagtggaaaacctggcttccagtctgcagttaataacagaatgcttcaggtgtcttcgcaatgcttgcatagagtgttctgtgaaccagaattcaatcaggtagttacacacgtaccttggattctgtttctttgtatatgtgcatgctggttctgtcatttggtttatctgttagaagttgttttgggctgggtaaggtggctcatgcctgtaatcccagcattttgggaggctgaggcaggaggattgcttgagtccaggagttcaagaccggcctgggcaacatggtgagaccctgtctctacaaaaaaaatacaaaaaattagctggacatggtggcgcacacctgtagtcccaactgctcaggagactgaggtgggaggattgcttgggccagggagaggcagaggttgcagtaatctgagatgatgccattgctgcaggctgggccacattgtgagaccctgtctcagggaaaaaaaaaaaaaaaaagttgttctggcatgatagtatcacccactgttattgcaggattgccctttacatctgctgggagaggccctctacaggccttgccattggagtctctctgactagtgtataaaataatggagtgtgtttaacattaggggttagatttcttgtttgtttttatcacatgttttgaggtatttggttcttcatagtgttttgaagctgattttgagtctttgttcctagattttacctgcctaagtttatatgcagttcttgacctcaggttgtaaatgttttaattacttttaatgttttaatttgttactcttgtgtttggacaagaagcatattttgtaaatttacaagatgacctgtctttcctaaagatcatgtaaagttccaagctctgcttccacctattttatgatgcgcacatttttaaaagtagttaaaacatgagcaggcgagctgtccagtgctcttctttgcttttacgtgttaccgtctcctcccagaacacagcatctttcttctttgattttgtggaacctgctttttattaaaaatttttacttgaagtcagaagccacaaacaggatgctcactttccttcctggacttggatgtagacagagcctccaggcttccctgtcaccactgtgacgggtaagcttgggctggtccagaagccacttgagggactcccttcggttagacacatatacccgaggctttgatatgattaatgagatttttaagatcaaaggagagagggtaaaaagtgagtcgtgtaacttcaatactaaaccaaacctgccatccatttgaggataaatggatagaaacaacaataatcttgataataatagtctacattctaaaacataactagttatatgctagaagcatctggccagaaggctagtttcttttgtccttttccagtcacaaggtgctctagtgtgatggggaaggaaaggagagccgtagaactaacttttgactgtggctggcagatacacctttgtgcttggctaatcttggtggggaagggagtgagcattcgttgagcctgccttcggcattgggctttgtcccaagggttttgcttgtagtatcttctttaattcttagaacaaactcaagaaattttttcatttttacaaaagatgaaactgtaacttggagaggttaaataacttgtctgagagtcacttgttaagtgagagaggctgggaacattctctccatatccagacatctgactctaaagcttaagcttaacaagcagtctgcccttactgttctgagcttaagctcaaaagcagtctgggccaggcgcggtggctcacgcctgtaatcccaacactttgggaggccgaggcgggtgaatcatgaggtcaggagttcgagaccagcctggccagcatggtgaaaccctgtctctactaaaaataaaaaattagctgggtgtggtggcacacacctgtagtcccagctactctggaggctgaggcaggagaatcacttgaacggggaaagcggaggttgcagtgagccaagattgggctactgcacttcagcctgggcaacagagtgagactccgtctcaaaaaaaaaaatgcagtctacccttgctgtcctgagccttacacactggtcttgttgtggatgactgctccatcttgaccctggacaggtgacttggtcttcctgagtatcagttttgtcctctgtaaaactaggtaagcaatgtcttccaaacaggctggttatggggtgtaaatgagattacttatgtaaatgcctaatgcacattgtgtgctcagtaaacattaaatgtttctgcctctgcctcaggaatgaatgtacaacacaagtttatgttaatactttctttcaaagcagtcaatttttattttcttttttgagtaatatatgcaaactataaaaattctaacattacaaaaataaatactatgacaagtaagttatcggtggtcttttggtagggccagcaaagcaagggctgtgctgtttgtgatatctttttattgcatgcaacttatggttgggcggaaatgaaaatgaacatttaagggtgttaatttttctgcctcttcccttctaggattgtattattattcactgttgatttttaaaggaaaatttcaaccatttagggcagcaattttcagaaaagaattttctagttagaaatactacaaagattctagtaaagactttgtggccaagcttaactaaggccagtatttctgagccagtcaagattcagattgcaactagtacatatttttctgatgttttactttaagtcgttaaagagttcatcaaaaggtgtgatgctattaaagcctagatctttttacatcttttgcactttgtgtggactgggactgtttttgccaagaatgcatggaatggggtaaaatacaataaagcaaagaatctgagtcatgggaaacttcaggaagtactcaaagaaagctgttggaagcagttagctctgcatgtaaatataacctctactgctagggttgctatatttttcctgtaaagagccagataataaataatttaggctttgtaatctctgtcagatttctcagctctcccattgtagtgcaaaaacagccatagacaatatatgaatgaatgaacatgtctaattttgtcttttttaaaaaacccaggaacttggatacgattggtgttgctgttgatttgattcttctgtttcgtgaactgcgagtggaacaggaatctctgttgacaggtagcatgcaatataattcatggattatttatatctttataaagggttcaaaaccagtactttgagtattaacatcattcattgaaacacatgttctgtatttcatgagatagggaaactttaatagtgaattattaaagaattataaagttgtatcaacttcccttcctgaatggctgaattttgttcctttcacatttgtatgttgaagtctgtctgttccagttgctataacaaaatgccttaggctgggtagtttataaacaacagaaatgtattgcttacagttctggaggctggaaagtccaagattaaggtaccagcagattgggtgttttgcgggggctgctctcgtcttcatagatggtgcctcttgctttgttctcctgtggtggaaggtggaaggcagaaggcataaacaagctctctgggccccttttataagggcactaatcccattcacgagggctgcaccatcatgacctagtcacttcccaaaggccccatcttatactagcaagttggggattagatttcagcataggaatttcggaggggcacagatattcagatcatagcatggtcctaacccccaatacccagaatgtgactgaatttggagataggatctttaaagaggtaattaaggtaaaatgagggtatatgactggtatccttataggaagaggaaattaggacatggccatgctcagagtagagaccatgtgaagacacagggagaagatgaccatctacaggccaaggagcgagacctcagaagaaatcagccctctcgacaccttgatcttggacctccagccaccagaactgtgtaaaaataaatgtctgttgtttaagccattcagtctgtggtaagacttttaatatttatgaatgtgacaggccctggtccaggttttgggtgtgattcaaacagtgaccaaaacagacaaaaagtgtctgtccttagagaactcacattccgttgaggggaaccacatgttaagtgtctaagtcaagtatctagtgtgatgaaaatggaacttagctctgattgttaacggttgttgacttgggattaagagaaacaccacacttctttagactcattagtagaatggttttggtctttgttcttctagcatcaacatctttcctttggacagtggttattatcttaacataatgtttaaaaaaaaaacgtagatttttaatttatgatctctttgtgccaggaattgaaatactttatgggtaaacctaaattatttgataaaaaaatcttaatgtaggctgggtgccgtggctcatgcctgtaattctagcacttggagaggccaaggtggacagattgcttgagctcaggtgtttgagaccagcctgggtaacatggtgaaaccccgtttccaaaaaaatacaaaggctgggtgcagtggctcaagcctgtaatcccagcactttgggaggctgaggcgggcggatcatttgaggtcaggagttcaagaccagcctggccaacatggtgaaaccccctctctactaaaaatacaaaaattagctgggtgtgatggcgcatgcttgtgatcccagctactcaggaggctgaggcaggagagttgattgaacctaggagatggaggttgtagtgagccgagatcgtgccattgcactccagcctgggtgacaagagtgaaattctgtctcgaaaaaaaaaagaaccgggcatggtggcacacgcctgtagtcgcagctacttggaggctgaggtaggaagattgcttgagcctgggaggtggaagttgcagtgagctgagatcacgccgctgcactccagcctgggtgacagagcaagactctgtctcaaaaaaaaaaaaaaaaaaaaaaaaaacaaaaccccagaaaattttaatgtaaatttccaggtggataagttagatgtactaaattataggttaaattttgttgttgttggctgggcgcagtggctcacgcctgtaatcccagcactttgggaggctgaagtgggcggatcacgaggtcaggagatctacctggctaacacggtgaaaccccgtctctagtaaaaatacaaaaaattagccgggcatggtggtgggcacctgtagtcccagctactggggaggctgaggcaggagaatggcatgcacccaggaggcagagcttgcagtgagccgagattgccgccactgaactccagcctgggcgacagagcgagactccacctcaaaaaaaaaaaaaaaaattgtcattgtaataacgtctttaccttataattcaatgaatataacctttaaatgagaagtctccagttgcatttaaaatattatttgacttacaaattgttttatatacagttttaatgcctgtactttgcatataacatgaggcatatttctttttttttttttgagatggagtcttactctgtcgcccaggctggagtgcagtggtgcgatattggctcgctgcaaccaccgccttcccgccgggttcaagcgattctcctgcctcagcctcccgagtagctgggattacaggcgcctgccgccgcactcggctgattttttgtatttttttattagagatggggtttcaccttggccaggcaggtcttgaactcctgacctcataatctacccacctcggcctctcaaagtgctgggattacaggcatgaaccaccgcacctggccacgtgaggcatatttctattgatgttaatatgtgtgcttctcttggtagatagacaagaactagaggtgatggtcttttttcacaggtgaaataggctaaattagcgtgttagagcactgcctggtttggtttaatttctgtgatttcctagtgttttcattttaaactcagtttgctagaaattcttggatcttgctatttgattttgaagtattcctttaggaaatggtaattaaaaattaattacttcctttaagaatttacagacaaagtgcatcaccatgtttttttgagcatcagtttttaaaataatctcaagaaattgaaaggatgtaggatttagttgtgaaatgtttttacgatattatatatttaaagatacttctgtagctctattttataataaaagggaagcatcagtactcaaaattggggaattataaattagcagtaaagtccgtgtttcacagtgtcacttggaagggcagctattttgaggtctctgtgtggtatagtaattgagaaagaaagttgagaatgtactgtgttttataattggtgatcctgatggggcgggcagtgtggcgctccagagctgctgtgctgtggtgggcggaaggaggtttctcttttaatgatatatgctaaataaagaagcaaaggggaagtgctgtacaaatgctgtgattaaataactattagaatggagccagcccctccaccatgtgctggatttcatcgccacttgcccacgcagaagcttttctcctgaaattatccccttgctctcaggcagcctctgtttttttcctctttactccatcattttcatcagcaagtaatatgccctcccatttttcatttaaaaatatcttcttttgactccatgtccccgtcagtccagtatctcgtttttctgctctatcccaaatgtgctacaaaagatgtatttagtttttacaatatatggtaaaagattatttcatccttcacaggattactttccactgaagcaggtagatgacctaagaaaaaatttaacggagcagatatctgaaactacttttatgaaccagtttgtcattgaggagtaaattggttatttggttgttagcttggctattcactcatattcactaggcagagagggcagattcttacagacctgttacatgttagctgtattaaatgttgttcttaatttaggtagttgcatttgtatgagtttaattgttttttattgatgtgagattcacatattgttaactattttaaagtgaacaatcgagtggcatttagtacatccacagtattatgcaactaccatctctacctaattaaaaaaaaaatttttttttttgagacggagtttgctctcgttgcccaggctggagtgcagtggcacaatctcggctcactacagtctccgcctcccaggttcaagcaattctcctgcctcagcctcttgagtagttgggattacaggcacccaccaccacgcctggctaatttttgtatttttagtagagatggagtttcaccacattggccaggctggtctcgaactcctgacttcaggtgaaccacccacctcggcctccgaaagtgctggaattacaggcgtgagccgctgcgtccggcctaaaaatcaccctaaaaggataccgttttcattgagcagctgctctctttccgcctccctgtagcccctggcaaccactacttagcattctgtctctgtagatctacctactctggatacttcatataaatggaatcatagaattaattatgtgacctttggtgtcttactcctttcacttagcataatgtttttatttatttatttatttttttgagacagagtctcgctgtcgcccaggctggagtgcagtggggcgatctcggctcactgcaggctccgccccctggggttcacgccattctcctgcctcagcctcccgcacagctgggactacaggcgcccgccaccacgcccagctaattttttgtatttttagtagagacggggtttcaccgtgttagccaggatggtctcgatctcctgaccttgtgatccgcccgcctcggcctcccaaagtgttgggattacaggcgtgagccaccgctcctggcctttagcataatgtttttaaggttcatccaccttgtagtgtgtatcattacttcgttcctctttatggtggaataatactccgttgttttgatatatcacattttgtttatccattcattgtttgttggacatttaggttgtttccaccttttgtctatcatgagtcatgctgttgtgaacatgctggtacatccaattgtttatctgtttttatttcttttgggtgtatacctaggaatagaattgctgggtcatatggtaactctgcttaccatttgaggagctgtcagacttttccatagcagctgaatcatatgacttttcaccgacaccatacgaatgttcccatttcttgcatccttgctgactctttctttctgtgttgtagtcatcctggtgggtgtgaagtgggggtacttcattgtggttttgatttgcatttcctaaatgatcacgtacttattggccgtttgtaaatcttctttggagaaatgtctatttgagtcctttgtccagttttcaattgggctgtttgtgtctatttcttgtagagttgtaaaggttttctatacattgtagatacttgggataatattgaatctatagatcaattggggaagaattgccatcttaacactattgagttttcaagttcatgaatatggaacatctctctatttattcaggacttatttaatttttcagttgtgttcctatttagtagatagcttgtgtttcgccacagatgttattggaaggatattattgaggcaggaaggaaaatggaaaggaagtaatatttctcatcaccttgaaaacggcagctagtgaaatgaccgaattttagttggaattcagcaatgaaatttggattcaacagtgaaacttagaaaaaattttatggtgtgttagttcaaacctaatacaaataatcttttaaaaagtattctggttcctaacaaagcgcctgtacttttttgactctttctctgtgagaactttattctaggtagattttttagcagggtatgtgtgccagttttttgttaccacacttgaggtaagaactgtaattacattgtcaaaataatatttagagtattattttcagggaataattgcagtggtatgacgaatatattatgcccatcaaattttatgtaaacacaagcatgagttattttaattgagttattggtgttgtttttggcctttattctttcttactctgtaaaaataatgttgggatttttgagggtcttcataacatttgcagtatttacataaagatcagttgataagctgtttggtaaagtaaactgtcatttgtacctgtctggagttttcttttcttgtgtctgggacatctttaagccttttccttttcagaattgtgttctgatcctgagcattaatcttatgtgcctgatgagttgttggatcagttggttttcagatcaacctatactgttggctttttgcatgttcagttttatacagatctgagtgttaatattctaaaatattcagtagaaatctttttttttttctttttctttcctttttttttttttttttttgagacagggtctgggtctgtctccccggctggatgcagtggcttaatcttggctcactggaacctccacctcctgggttcaagcaattctccctgcctcagcctcctaagtagctgggattacagacgccttccaccacgcctggctaatttttgtgttttcagtagtgacggggtttcatcacgttggccaggctggtctcgaactcctgacctcaggtgatccgcacccccctcgtcttcccagagtgctgggattacgggtgtgagccactgcacccaggcaataagttaattaattttgtatgtagagtatattgttttggtaaggcatattaatttttttttttttttttgagacagagtctcactctgtctcccaggctggagtgcagtggcgtgatcttggcccactgcaacctctgcctcccaggttcaagcaattctcatgccccagcctcccaagtaattttttttacttttagtagagatggggttttgacatattggccaggctggtcttgaactcctggcctcaagtgatccacccgccttggcctcccaaagtgctgggattacaggcgtgagccgccgctcccagccatggcatattcatgttattcccaaagtgaacttgtggagacagactttaatttttaaaagaagcaagcagaaactttctgtttaataacatggagaatatttcttaagatgcatttatttattgtgtttaatcatttatttatttatttataacttttatatattcttagcttttcgctgtggcctgcagtttttaggcaacattgcctcacggaatgaagattcccagtctattgtttgggtgcatgctttcccagaactgtttttgtgagtatattgataagcatttttctaacttgtgagaagattgtggctatatttttccattttatataaagttcgaaaacaggaaaaagtaacccactgtaatagagttcaggatagtagttgttcttggtgggtgggtaccagctgggagagggcactagggaaacacctgggtcctggaagtgttcgtctatatcttgaccttggtggtggttacatggatgtatacatatccaaactttgttcattgagctgtatgtacacttaagatttatgcccttgattgtatatcagtttacttttacaaaaataaagtcatggataaagtaagtaatattgttaaggacactgaaatttataagaaacacaattaaaatagagcatcaaagtatgggcaatgaattaaaattgtttatgtattgaatactgatatgctgagcacaatgctgtatgttttggaagataagaagaagatgtggataaacaatcagtttatccatgtaagaagtgagtaaccagtccatttatcagtgtaagatgtgggtaaccattccatttgtctcgattggatcctggtactttttctggtgattctacttcttaaaaaccagctctgttcataagaaattgagcattgaggtaaaaggtgagcagggaatagagtcagtatacctagtaggaaaggcacagtctgggagtgggagacctggctttgaatctaggctttggtgccaatgaatggggtgactttgatggttgcaacagtataagcagcacagcagggtagcagctgttgtgtacataccctgaactgggcattatccgtatattttttctgttctcacaatagcctgcagagtaagtgttactgtctccccatttggacagatgagagacctgaagctcatcactggtaaatggcagaggtagagtgtaaacccattgctgccatctggatctaaagcctatctatgctcattgtaaatactgtgctgcttaaattccgtaatgcccttccttgttgtacagctttcctgggctcctctgtgaagtatagcgttaagatgggataaactctaattcacctgtagctcatggaatttctcaaattcctgcaaataattaagagttgaaggtgtatatatattaatgttacatatattaatgatatttgagcttaggtggaagaagagaattacgaaattcaagctacagaaataggcattgcttatttttgagaattcattcccttaaaacgttttggatacctaatatctgccaggttttgggatagatgattagaatgtggtggtaacttatatattcgttattcctgaaggatttcattctttggttggggaagtaaaggaacaggcacataggttgtgatgtaagaactaaggtaattagggcaaatccagggtgtaatagaaaaacaagggagaggcttaagtgtaggtcagtcagagaagtcttaacagtttacatgttgcttttagatgatctcatttgatcgtcattaaaaaccctgtgaaatagaggttttgttattgtattttattttttataccagaaaacatattaagagaggttctttgccttcactttttatgcatttatgggacagatataaccaaatttgaattccagttttgtcaggtgctggctttgtgctattggccaagtgaagctaacaaattctttatctgaaatagatgaataatacctccttcagaagagtattatgaagtttaaatgaaaaaaaatcctgccatattgcataacccatgatataattgacaatcaatatgtcagtgaccttccccaggtcacctggctgatagctagaggagctaggagttatagcgaggctcctgactccaaattctatttcttgccccactataccatctctcctgtaggcatcttgtccctaaggactattaaagcagtgccagcagtcattgaggtatcattttgtacctgtcgattttttctttctaacaagaatgaacattttaatgttttataaatgtaatcattctaatctttttctctaatggtaagttatttgccttttgccttctgagttctatgtcaacttcaactttaatattttggatactttttattgtgactaagtttatatttactatttttacagtaaataatctacttattttaaagtgctataattctaaatcctcaaaagtattagcatgtagtgaatttgacaatggtattactgttatttttgtgttttatcatgttactaaattgggctaacaatctcatttccttgtttggaaggtcttgcttaaatcatccggacaaaaaaattgttgcctactcttcaatgattttgtttacatcccttaatcatgaaagaatgaaagaactggaggagaacctcaatattgcaattgatgtcatagatgcttaccaaaaacatcctgaatcagaatggccgtaagtatcttgttagaaatttgattgctttggggcatcctgacagatcactttccttgcagaggttttaagtaaaaatttggacattgtgataattgaacgataagttaaaacttaacatgtgttgacagaattagagaagattttgagcagaatctagagaacttgtgaatgaggtgaataaagtgaggcttgaattgagcctttaaggacaaagagaattctttaaggtggtgaggagcgggaaagacattcttggtgtatgaaaaaacagtgtgaaatgcccaggcacctttggagtgcacagataagactgttgtggctgcagtagctagttcattagatcagaggttggtgcgagccttgtaagcatctgtgcagatgagatagagactgccattcaaattgccccccgatacataatgtactgccacccttcatacataatgtgttatttctctgtgattgcttttaagatttttctttgtcttttcagaggttaattatggtattggcatagatttctttgggtttactctttttggggtttcctcaacttcttgaatcagtagatttatgtcttttgccaaattggggaagttaatttggaaaattttcgctgttatttgtttgaatactttttttcaggcccttgttctctctccacttcttctgggactccatgttttaggcgcacacacagtccaaggcagggccaaggctgtggctcaactgatgggactgtgaaaataatacaagttacaacaatctacttttaggtttagacagtttgttacttatatagacagagaaaagaagaagccaaaggggccagctcctcctgatccttgtcccagacaccacaaagacctggatgattaggatatgaattgtgaggtatcccactcctgaggaggccttcttgactgtttaaagaggcattatatgctaagaggggcaaggcagaaagctctgtacctcattagcaccaaactcattagaacctgtcccatgacagcctcccctaggagacagaagagcaaaaaggatacagcctcagaagcctcaggcccctcccatctcgggttccaggaggatcacaagctattcagcaggcaagactcagattagccgctgttcaagctctggcatgcatggtatatatggatacatccaaggtcaccagggcactatgtggagctgttcccctagactctgaagatacaagtgttagtcttctgttgttgttttgtaagtgcctgaggctctgttcagtgctttttttttttttttccagtccattttctctctttgccagtactacagtgtcttgattaccgtaattttatagtaaattttgaaatcaggaagtgtgagttttccaactttgttctttttcagttttgttgtcctgggtcccttctgtttccatattaattttaggatcaacttttcaatttgttaaaaaaaaaaaacagctggaattttgataagaattacatgaatctgtagaccaccttgggggaatattgccatcttacctagattaagtgttccaatccatgaatagaggatattcatttatttatttaggccttttaaattttcgtcagttatgttttgtagtttttagtctatgagttttgggtgtcgttagttcagtttattctaagtattttattctttttgatggtattgcaaatggaagtctttcatttttggattgttcattgctaatgtgtagaaatacaactgatttttgtatattaatcttatatcctgcaatctttcttcctgaacttatttatagttttagtagatttttttgtgtacgtgattcttaggattttttctgtacaggaccgtgccatctgcaagtaggtaatatttttttctttccagttgggttgccttttctttcttttccttgcctagttgccctgactggaaattccaatacaatgttgagtagaattggtgagagcagacatatgtttcttatttaagatcttagtggggcagtctttcagtgtgctgttgcctgtggggttttctaagaagcccttgctcaggatgataaacttttcttctacttctactgattttcttttacttgttgaatgtttttattatgaaagtctattttatcaaatatattttgtgtctgttgagatagtcatatggctttgtcttttagtctattaatactttgtctaacagtgatttttatactttaaatcaactttggattcctgagataaatcctacttgttcatagtgtataatcctttttatatgttgctggattcggttcatattttgttggggatttttgaatctatattcataaggcatattggtttgtagcttttttttctttttgtgatttctttttctggttttggtatcaggtaaatactgactttacagaatgaggtcttgttttgttttgtttttggaagactgtaaaggatcggtattcatctttaaatatgtggtagaattcactggtgaagccatctggtcttgggctttttatcatgggaagggttttggttactaattcaaacctgttacttgttacaggtcttggtttttttttttgagacggagtctcactctgttgcccaggctggagtgcagtggtgcgatctcggctcactgcaacctccgcctcttgggttcaagcaattctctgcctcagtctcctgaatagctgggattgcaggtgcccgccaccacacccggctaattttttttgtatttttagtagagacggggtttcaccatcttggccaggttggtattgaactcctaatctcatgagccacctgcctcagcctcccaaagtgctgggattacaggcgtgagccaccgcgcccggcctccacttgttacgggtctattcagattgttgtcttcttgggttggttttggtagtttgtgtctttctaggaatttgcctgtttggtctaggccgggggtcctccagcccccgacctgtggactggtacctgtccatggcctgttaggaacaggaccacatagcacaagataagcagcaggcaagcaagcattcctgcctgagcgccacttcttgtcagatcatcagccacattcgattctcttaggagcacaaaccctgttgtgaactgcgcatgcgagggatctaggtctcacactccttatgagaatctattacaactaatgcctgttgatctgaggtagaacagtttcttcctgaaaccgtccccccacccctgtctatggaaaaattgtctttcatgaaaccagtccctggtgccaaaaaggttggggaccactggtctaggctgtctaatttgttggcacaaattgttaatagacccttagaatttttttatttttgtaagattggtaggaatgtcccctcttcattcctgattttagtaatttgagtcttctcttttttcttgttcactatagctaaaggtttgttagagtttttgctcttttcggagaaccaacttttggttttgttgattttctttacagttattctctatttcatttctttttgctgtaatctttattatattctttcttctgcgtgctttgggtttggtttgctcttctttttctagtttctcaagatggaaggttaggttactgatatgagatcttctgtcttttttacataggcatttacatctacaaatttcctggtaggaactactttagcatcccataatttaggattctgtaaattttggtgtttgtgcttttactttcatttatttcaaattatagtccaatttcctttgtgacctattggttatttgggagtttgttgtttaatttccacatatttgtttctaattttattccatgtggccagagaacccactttatatgatttcattctttttgacattacctaggcttcttttatggcctgacatgtggtctgtcatagagaatgttccatgtacacttgaatagaatgtgtatgctgctggttttggtggcatgttctgtagatatctattaggtctggttggctagatggttgatagtgttgtttaaatcttctgttttcttgctgatcttctgttctagttcttttcattattgaaagtgaattattgtgcattttttccttcagttctgtcagtttttgcttcccttattttcatgctctgttaagtacacacacacatgtttatatttattattgttataccttcttgatgcattgaccctttctcattataaaatttatcacaaattttgttgtttatgttttaacaatatcctgttttttaaaaaatctatttttccatatcttttgcacatagtagtcagtgtgtgattaggccacagattttctccagggagtaagccttgagcacctgtaatcccacttgcattcacaggtgaggtatgagctttttcaattttggcttcttgcagtgtaatcttttatcattctattgaaattatacctaattttgaaattatttctttttctgaatattcatttgtatttcaattaagatttacaaacaaacagaagttggtacatacaataatatgatgtgtttaacttagaaaacttccctttgtatgcaaatgtaacatgacaggatcaatcattagagtcaacttacttagagaaattttctgtagctgagttctgttttatttgttgagtaccttgggtctgtattttaatcatctgcagtttttttttagcagcttggaataaagggcaaaaggtcataaagggcaaaatataaaatctgtttaatataatataatatgatataatataatataatatataaatagctcaagttaaaggtattagagaccactagaaggaattcagaaaggaacaaaggatggatctagtagtggttaaatgatcacttctgcagtccaggtgcggaatactttgatttatgtgagaggaactctacatttggtaacaaacaatgagatcacagaatatccagaggcttctgacgaaattgttgtttttgctgttaaatataaactcatccctggaaattggagaaaacccactttctgccttttttcttccctacattttaggagataggtggcaaataatacaaaactacatggtcttagaattcatggtttcattatgttttcttttcttcctttgcttgtttcttagaaaagggcaaatgtgattccaataactttgggtttttttatttgagtatactagagacacaggaaagtgtaggcgagaaagtctttggcactacttggtttgaattattgggataatgtctttctaaaaatgtctgttcttttgtttgtaggtgtgaaagatgttttcatgctcttagataaccctagatgaatccagggattctattttgagttcatctaaatctgaaagtccagtaaatgtgcactggtaggttaggtcagtcagtgcagaattacacagtagaggaagaggtaggactgcctcgtgctgatcctgtgatgtgttggttgctttgtctgtgtaatctcattttcacattgctgccatcctgtgaattgtattttgctactatgtacctatgaaagttaagcagagtaaaccagtctgacaaaggtcacacaactagcatatagcagaggcagcattgcaagtgatgccaaactcgagggcctatcccatttttattaataccatgtcatgtgttatgaaaattaccgattttcagagaggaggtctgcatttcaaaggtgaggcatgaactcttttcagttttagcctcttttggtgtaaactttttctttttgagacagagtctcactctgttgcccaggctggagtgcagtggtgtgatcttgactcactgcaacctctgcctcccgggttcaagtgattctcccatctcagccccctgagtagccaggactacaggcgtgcgccaccacgcctggctaattttttgtatttttggtagagatggggtttcatcatgtcagccagcctggtcttgaactcctgacctcaggtgatctccccgcctgtctcccaaagtgctgggattacaggcatgagccaccgtgcccacctaaacttttattaatccattgaactttttacccagtttcactacaaaaatgaagttataactgggagcaaagcattcttttttgttagtatttgggttatctagttgatttattttgtattctctagggatgtgtcttgccttatgcatgtacattttattatcagcttaagtgtaacaatattaggaagataaacataattgtccatcctcttgcagtctgaatctgttgcccctcttctgttcgcgcacaacagccatgcattccactttcatggcacttagcgcatttaattgtccattagactgtgagctccctgtaaggcaggatttagtgttgtttgttattggatctttaacaagataatatctggcatgtgataagcattattttagtcatgattcttctgaatctaagtgactgaagtccacttcagatggtttatgcacataaagggatttattggcttatgcaactgaaaaattccagggtcattgggtgaaggcacggtgaatccagggctgaaagatgtcatcagtatctgtctcatctttgtctcatttttctcctgtgctggctttgttgtaaggcacatttcctgcttcctgtgttggctcctgttcttgcctactcagggttggcatggcccacggctggtcctcagaccactcttctccattattgctcattctctgggtgacctcatctcataccacagctttaaatacctcttctaaattgatgatttccacatttatgtttctggccttgatctcttgctgaagctctaggtttacatatacagcttcctattatgtgcttctaattggcatctgaaatgtatgaaggctgcgtccaaacttttgatttcccccacacataacacctcctgttactctaccaatgtttatccttcagtaactggtaccaccatttactcgtttgctgaggcctggaacctgagtcctgattttctttcactctcacccacttatactcattagccctatcttcaaaaggtgttccacattcacctacttcatgcctcctctgccatagacatctttcattgctactgccagaactttcttactcatctttctgtctctccttttgccctctgaatcatcacacagtagccagagtgaccttttaaaaattactgtagctgttgtcactccttgcttaaataaaccattcagtgccttcttattgcaacctagaagcaaatccaaagtacttgtcatgtcctggcgtctgactgaccacctcatcttatttcttactacttttactcctgctccttagttccatctggtcttactgtttttctttgaatactccaagtttgttctgtcctgaatctttacatccgctgtctttctgcatggaaccttcctttagatcttcccatggctagctcttttaggtctctgttcaaatatctatcatttcgactgagagaccttcccagcactttatgttcagtagtgtttcctgtaaacccgtatcgctttactctcttttattcatttgtttaatagcacttaccactatcgaacattatacaaatcttatttgctttcttgtttattgttggttgctagaatgtaggactagctccataaggccctggagtttgtcctggtcatcattctatccaaagcacctagaacatgtgttgacaaactatggcccatggtctgaatccggcccactgcttctttttataaataaagttttattggaacacagccaagcttgtttatctattgtctacggctgctttcatgtaacagtggcagagttgagtagttgtgacagagaccatttggcctgcaaagcttaaagtatttcctgtctggccctttatggaaaagtttgccaaccccatccattgaagggtttttggtagtagtatttgttgaataagtctggtgattggtggcatcgttgtccttcagtcacttcaggcttatctgaagcagataagcctggttctcctgaaccagataagactttggtgagagacccccaaagggtctgtatcgttgttctctagaactctatacaggcttcttcattttacatcagcaatctattcctgaaaatcagacattctgtgcaaaaaagtgactgagagcctacttccttcttaaaaatggggacattataaaatgttacatgtctacccaaaaccccagtcagtgtcttaaaatagaatcaaactaaaatactattcagcaataaaaaggaacaagtgttggtacaagccataacttgggaagatctcatggtaattatagcagagtgaaaaaaaaaagccaatgaatccccaaaggttaaataatgtatcattccatttacatgacattcttgaaatgacaaaattacagaaatggagaacggattagtggttgtcggggattgaggaaggatgctggagttataggcgggtgaacctgcaaaaggggtgccgaaccgttctggctctcacctgtgagaggggatctgtgaccctgcattattaagttacagagagctaaagacatgcacacagctactcctgagtaaaggcacaagttaacctgggaaacctgagtaagatccgcacatcgtgtcactgtcagcatctgggttgtcacatactatagttttacagatgttaccattggggaaaactgggtaagggtacacagaatctctcttgtgttttgtaaaactgcgtgtgcatctacaatgatctcaaaataaaaatatttaattaaaaaaaacccaaactcggtaaagcacctgtgtatataacagactatcatgttaggatgtgcactgcttaaaacatttctttctgattgccatagaattagtatagttgtcagcagacagttggctttgtatgcgggaacatggagcctcttaatgccaccattatgccagaagtgcttcttaaatgtctgtacacagttctgactttttaccaacagtgtatggaatgcatcttgtgattttgtgtatacgtgtatatctttttgtgaaatgttgtatggaatactttagaatataaaaaaaagtttcttctgtaaacattgactggcaagggtattgagaagtttgggaattagaaacaaagaggtaataaccagatggatgtttttgaggcatgcaagtggctctttttgggtcacattgtcatccctggggcagtgctgtttgttagggtgtgcagtcaggtgacctcccctgggggcacaggctgtcaggtttgggcccactcttgaaggaaaaagctaccaggtttgggctcattcttgaaggaaaaagaattcttgttatccaaggaaggaaaaaaggggatgctgaacaggggaaaaagtggcagatatccacaaggactgtcagtgtttggcgaatgcatgtccttttcattatctgcttttgcttcaggagggaaacatagtttaatttctttgatttttgttggagttgaattctgatacattattactggaaacaggagaagcagaataccttgatactgaagggtagacagcgtagccagtgtcacactgccagtgagtgttgggctgagactcaaacccagctctttctgagaccaaaatttgtgctcttaatctgtacacccactgcctcccttagaggacgacattaaaggaagggtggctgggatgtgcgtgtgtgtaatacgtttcccccagtgcctggcacatgtagattcaggaaatctatttatatatttttcagattataactcattttcttctagtagaggaagcatcgccattgaatcagtggactgttatttttctagtttaatgctactcacgtttaacccgttggaaatgttatttaactcttttaacaggagaagggaggttattttctagaccagctttgtaagctttgtccaaattgctgtgttaagcaactgtgggttagatttcccagatctcacaacaaaggagagtggcatttattttccatagcacatttaaatcaaaatttgtttatgaggtataaaaacattttctaggtttttgaactgattgaaatctattttactcatgttgtgagtatagcatcgccattgtatgcatgtatggatatggataatagatgaccttcattaaaaaaaaaatttccctgaaaccccccgtctttaggactgtctctgtttactggtgaggagttcgcctttcgctgtctgttggcatgtgctcctcgatgcccacacaggtgacctttactaccttctattttgtatatcagtattgtaatgcagatgctgattcatctgcctgcaactgttcacgtactttaaaatcaatcataaatgagaaagattgagagaaggaaaaagatgagaagagagaccttcatgcattttgttttttggcaagtgtggaaaatgatgtaaagtgtagttagtgctttggcatcaacaatgtgatttgtgaatgttagcttttctgtgatgacatttaaatgatgaatttcaagattaaactgaggagttccttaggcgaacttacagagttctcctatatgaccgttcctcgtccttaaagcctgaggagccaggttcatctgaatggtacttccaccaagatgcagaaatactgtcactctttagcagaatggttattaagtagaacgaagtgtgagcttactttgcctgtatatattgcttacattacatactgaattatttgatagactatatgtggttcagatatcaaaatgcatagtttacccccagccgtttacctagttcttccaaccacaacccctacttctccccacactgttgggctttttgcttttttcactaaatagtacatttctgagatctttccatattcctatataaagactttcctcagttaaagatctttcattgtatgaatataccaggatttatttcatcagtctcttctctatgggcattctgattgtttccgttttttcacgactagaagctactgccatgaatagccttggttgcacatgtcatatcgcatgtggacaagtaatgattgtagaataaattcataagtgcaattctgggtcaaaaggaatgtactgttataattttgacaaacacttcaggttgtccttcatcgctattgtgccagtgtcaactcccctgtcccacatcattgctaacagtgttagcaagatttggatttgccagttctgccaaggtgtaaaccggccttcttgcacagttttatttcgtatttttcttatgagttggagaaccttttttttcttttatgtgtattctaattttctttacctatttttctattggggtattgatctttatcagtgtataggagtattttctagattagggatatcacccatcatataaaataaaatacatgtatttttctgtttttgtattttgactttgttcgtggtattttattttttatttttttgagacagcgtctctgtcactcaggctggagtgcagtggtgcaatcatggctcactgcagcctcaatctcccaggctcaagtaatcttccctcctcagcccactgagaagctgggatcgcaggtgcataccaccgcacctggctgattaattttttattttgtagagatggggtctcactatgttgcccaggctggtcttgaagtcctggccttaagcagtccttccaccttggcctcccaaagtgctgggaatacaggtgtgagccactgtgtccagccatatgatacttttttatgtaaaagtttttgatttttttagtagatgaattaatcagtcttttaaaaaaatgtgttccgtagttttgataatagctataaaggcctttcctctaccaaggctttcttctagtatatcatttcaattttgttgtttaagtatttgatttacttggaatttatgttggtttaaaggttgcagtgtggattcactctcatttttgtttctgatgatgctggtggtcccggcaacagagcactgtcatggctgagacctgtcttcccttctcctccgtccttgccctagtccctatacccttactgctccatccatggacaacttttttacttcaacttttgcttcctaaccacgcattccagcatgcagaactcagtccttcctttacgatgtctcagttctactattttaagtccttgaggattttatgaacatattgatcaaatcacatttattgaacatttgttaggagatttttggtttttcaagaagaaaatttccaaagtgaagcagacccagtctgttgcccactgtttaaaaactgtttatatatattgtctggttttatgttgtttaaggtagggggtaaattgttattccattatgcccagaagcagaagcgatagttggagattttaacacctgcttttcagccatgggcaggactcatagacaaatatcagtatagactgatgttttatacattatataaacatgatgatatggatcaagtttgtccaacctgcaggccgcatgcagcccaggatggctttgaatgctacctaacacaaatttgtgaactttcttataacatgagttgtttttgttatttgctgttgttgttgttgttaagctcattagctattcttagtatattttatctgtgccccaagacaattcttcttccagtgtggcccagggaagccaaaagattggacaccgctgatacagatgatcttggtagtactgtcgtaggtagccaccttcacctgagtgatatttatagaccttcccttagtacttccaaactccactttcttttcacctgcatgtgtcatgttcactaaggtagaccataggctggcctgtacaaaagtttcagtaaatgtgtaagggattgaaatcatagagcacattctcttactcataagatgatttctagaaaaattccaaacttttggaaattaacacatctgattgatttgtcaaaaaagaaatcacaggcaaattagaaaatattttgacctgaagtaccaagttttgtgggataaagcaaaagcagccaagtgtggtggctcatgcctgtaatcccagcactttgggagtctgagaagggaggatagcttgaggccaggagttcaagaccagccagagcaacatagtaagacactgtctctgccaaaaaaataaaaataaaaaaagctgcgtatggtggcacatgcgtgtagttctatctacttgagagactgaggtgggaaaattattcgaacctagaagtttgagggtgcagtgagctatgatcgcacaactgcactccagctaggtgacagagcgagaccccatgtcttaaaaagacaacaaaaacgaaagcggcgcttagaggagagcttattgctttgagtgcttccttttttttttttttttttggagatagagtcttgctctgtcgcccatgctggagtgcatggagtgcagtggcatgatcttggctcactgcaacctctgcctcctgtgttcaagtgattctcatacctctgcctcccgagtagttgggattacaggcatgcaccaccacatccaactattttttttgtgtgtttttggtagcgatggggtttcactatgctgtgttggccaggctggtctcaaactcttgacctcaagtaatccacccacctcagtctcccaagtgctgggattacaaggtgtgagccacggcctggaatgtttctattaataaagaaaggtctgaaatcagtgacccacagttctactttgagaggatagaaaaagaagagcatagtaagtcctgagtaagtaagaaagaaagaaataaaagatgacagaaatcaatgaaacataagacaaaaacaatagaaaaaattcacaaaggcaaaagttgatctttgaccaacaaaattgatcaagaaaaaagaaagagagcactaattaccaacactatgaaagaatgtgtagttatcacatcagtcttcaataaactcaaaccttggttgaggcaactttcttcacctgagacactctgaagacccacgcttttgggtcctgacttccttttgaagccctaatagtattttgttgcttgtagttccccagacacactgctgttctttccttcttgctgtttttctaagtcctttttttcccctcctaatttaaatgctatcttcttttccttcttctagggattggcgaaatacctcctctagcctgtttgatcttcttgccccctgtctgtcacccctcttgcccccagcctattggttagatacatttgtttctattatataatccttaatgtgtatctgtcagcacttaacatgttcttctgtaaattatctgactaaatatgggtctttattgtttggagaatatatttggcaatatggcttgtgacttggaatattgcgtttttgctattcttatgggaaaatgctttaaattctaagtacctgaattatgaatgagctttaagatctcaatttagtttgtgtatccatctgggattgcatagatttctattgacctgcccagattgataggaatactgtttgagaatttcaaatattatccattatttttaggaatattttacatcagagtgttgatcagctattttaaatgctgtagaggaaatagaatatgtatttggatttcgcttttatgtgaagtgacagtgtattgtagtagttaatatgcttcatttggttatcagactgaatatagttttattgtatttttgtattgttaagtgattaaactatgtgtcaatatatttaatgcttgcagtcaatttttattactataacctggttataatcagtatattccttagttcttaagtcttttcctcagatgccctctggtaaatataattcataattaattaataatagtgttgaatctttttagttgtcacaggggtactttgaagaactatgcctataatctttgccttggggtttccataagttgatctcttaagtttagatgagtgcattgcttgacaatgaggatgttttcttggtaacttgagaattcttaaagagtgaataatcaagccagtaatggaagtgtgacaagtctttctctggttcattatagcagttagcttctgactaaaccaatttaatatgttttttgtttatacctgatcttgttgctaaatgaagaatttttctttctcaacttagataacagctatagtagccctgtcttcccgttgaatcaatttaaattatttccataaagctttcagaagtaaaattggagaaaaatatttttaggattttttttccttttagctgctgatagattaatagtatgtgaaccttttaagacatttaagattacagcaaatcaaaaattcactgaaaagaaatgcttttgtgtgtaagtggtgcctataaagtagataagggcatgtctcttttactatgtttcaagtaaccaaactttcctcctcttttttccctaggttcttgattattacagacctctttctgaaaagcccggaattggtacaagccatgtttcccaaactgaacaatcaagaaaggtaaccccccaaccagcgtggtctggagtatttagcattccatatagggtattcgatgcacgtgactgaaaagctgtgtggtttctgagttggcacagaatctctaaatacatgtttctgtgttggtaatggttttaaattggttggttaacattacagcttagccacagtaggcagtgatttatggagggtagcaggatccaggttggtgccattattcagtaaatgcatattaagaaaaacattaagaacaaaatattatgcatatgcctggattttagaatagtaatttatgtaactgtgtattacagttgaatatttgaggtgtactcatttgtttaggtcatgggtgttattatttgtgatacactctgctaggtttgtaggtttctaatggataatttggactaaaataaaattgacgcccgtccacaatgtcacagttactgtagtaggaaaaacagtgacctaggagttctaagacactggccctgtgctttgctgtgattatagttctttatgtgaccttgttgggattcaggttcgtgtgtgtgtgtattttttttttttttcctaaacctctatggtaaggtacaagggattcagtttcttgacctgtaaattaaggagattgaataaataatttgcagtacacttcatttcaatagaatatatttttcctaaccttattagaaatgttgccttaggaaaataacaaaatatattcagaaactacagatctagtgatgaaaatctcttaaagttgttaatcttttgattgtagtcacgagttttagtggttttggactttttactttgtatttaggtttcagtagttaagctttgtgtacttttgtagtcttttattaattaggtcatttttcttctttaatatctcaaacaggaaaagcttatgcttttaaagtcatatgaaataccaggtttataagtccaattccagtgcttctttccctatatgtatacccccattacagatagagaagtatttgtagttttttgacctaaaagagataatacgacatacagtgctaaaaattagtatttttttttttttgcagtaaggaacacctgaatacaggaagaatgcacagtttaattgtattttaatattcaagctgatattttccatagtctatcaaaattatctatttttaaatggtttattacataactacatggtgatggtagactaaaaatgttttatttttattgataaagttgtatcaggtgcatccttacttcattcaaggttctgctcagttgtcacctcctcttgcccctgctttatttttcttctggaggagatgagctgtcatttcatcacatcattcattcatcgtgttgtgtcacatacctgcttgttattgtagcacatttccattagattgttggcaccctgagggcaaggattcatcccttcttattcttcattccacatttccagtcagtggttggcacacagcaggtgctcaaaaagaaaaaaaaatagtttttcagtgaaagcatgagtgaatgaatgaatattcttactcaataaagtgttcctctagtatattgattaatgtaatcttatcttctaagttggaagcctcaaggttatactcagcttctccactttaccttttcagttcatactggtcagtaaaccttatcagttatactatcccaaggtcttatgtatttattctcttttttgtcacagccctagtttaccctatggaatctttgactagattttgacaatagcctttgtcaaaaaattgtggtaaatcacacataatataaagtttactattgtaaccttttttttttttttggaaaaggtataagacagggtcttgctgtgtgttgcccaacctagagtgcagtggctgctctcaagtgtgatcgtagtgcactacagccccaagctcctggcctcaaacaatcctcccacctcagcctccccagttgctgggagtacgggtgtgggtcaccatgccagactaccattgtaaccattttttaatgtacggttcagggggtgtgaaggatgttcacattgctgtgcagtgaacctctggaactttttcatcttgtgtatcagaaactctgtacccattaacaataaactacaatgaggtaccacttgatacccattaggatggctactatcaacaaactgaaaagaggaagtttgggcaaggatatggagaaattggaacccttgtgcactgtttatttcctactggtgggaatgtaaatggtgcatctactgtcttaatctgttttctgctgccataacagagtcctggagagtgggtaatttataaagaaaagaaatttatttctaacagtctgaggctgggaagtccaagaacatggcactggcatttggtgagggctctcttgctgtgttatcccatggtgggaggtgagagggcaagtgagtgcatgtgagcattacagagacacagtccctgcccttactgtgagggtaataaccatgtgttgttatgtacaagaatgacagtgctgtgtaaattcttaagcttttttcttgtgctagttcttttcattgttgtcaaaattagttgacttcttcacccagaggctggtagtctattcatgcagattactcggtggggaaattttggatatagactcatcatcaattcacgtggcatgattcagcaaaaatgagagcctacatttacatacttgtctggtctcctttccaggtgaattggagtgaatattaacaaattggactagctgctcgtggtaaacagcttgtgtagttttcaggtttatgatctctgtgtacggcatagtagttaaggacagatgctagtgctgccgcttactactttggataggttaatgagaataatagtagctaccccatgaaattgttatgataactgattgaaatgtgtataaaactctcagtgcctggcatgtaatggtcacccccgtaaacgtgttgcagggaagaagataattgactttggcatcagaaagagttcaaataccacctcagtacctctgtaacccagggcaaataccttaatctataacctgagctattgctatttctgcttccatgctcttactactattactgcaactacaagtctaacaactactgctactatgctgatgaccttgccgttttctccaggtagcatcaccgttatgtatagaaggcaccatgtagcccttgtcatttaatcctcacagactctgtgaaataggtattattcttgacattttccaaattggagttctgaggcctgtagttccagctactcgggaggctaagccaggagaatcactttaacttgggaggtggaggttgcagtgagccaagattgcttcactgcactccagcctgggcaacagagcgagactctgtcacatgaaaaaacaaaacaaaacaaaacaaaacaggaatcgtaattttaaggcagactatgtaagtactgtatttaatcaggggagaattagaaatagaatgctaatgacagccagtgattgagagacaaaattatggcagcatggctctgtttggagaggtgtgtctggtgaactcagagcagcctgagtgatgatttctgggttaagggagcaagactttcacaccaatgtgtaataattctagacggctgtagcctctaacccctttagctgggtctttcctacttttgcatccttcacaccacagtgaataagtcaatgagtaactagcatttgtcagaccacttgtattcttttatattttcaaggaagagatagagggttgggtggagtgtctggtagggagacccgtataccagactaaagagcttttagactcattccttaacagtgggaaccattagaaggtttaaatggcagatgacttaatgtaagtaggatcatttaatgaaggatagtctattctgaggtgatagtcaaacttagtttgtacttttatattttaaagattcatttctgactttgactgcttctttcctttgaaatcactcagtacccacatcgttagctctctcatcttgtaaccatataataaagctgcattatacaggcggcatctgctgggccagggagaagttgagccagaggaggctggcctgtgtgtcattgtgtaaggaaggcagtgtgtgcttctactccctttagcacttgcagatctccctgcacctcatccgcttggacccccggagtctcctgttgctgctgaacaactttgatttccaccaccttggggcccacccttcctgtcctcacctcaggactgcccatttgggatctgcccctgattcaggatctgcactattgttcgttttttttcttcagttgtaatccatctgttttctttctcatttctccacatccctatctgtggataccttaacactcacaaatctgataaaattattttcttctatttcattacctattcaagaaatagtgaactaggtgccaaattccctgaagccagggatcctgacttcttatacttagcaataactgttacattatgtaatccaatttaaaaggaatatatttagagtacgcatttgggccacgtggaataggtggcctcttagcattccttgaaagtcatatgtgtgtgtgtgtttatatatatatatgtgtgtgtgtgtatatatatatatgtagatagatccacttatgatagagatatatatagataggtatatctatattttatatagacataaaatttcagtagcttttggggtacaagtggttttggtcacatggatgggttgtatagtggtgtggttttggtcacatgggtgggttgtatagtggtgtgatttttggtcacatggatgggttgtatagtggtgtggttttggctacatggatgggttgtatagtggtgtggttttggtcacatggatgggttgtatagtggtgaagtcggcgattttagtgcacctgtcacctgagcagtgtatattatacctgatatgtagtttttattccttaccctcctcctaacttcccgcctgctgagtctccagtgtccattatactactctgtgtgcctttgggtacccatagcttaactcccacttgtaagtgagaacatatggtatttgatttttccatttctgagttcttcacttagaataatggcctccaactgggcatggtggctcacacctgtaatcccagcactttgggaggtggaggaagtcagatcacttgagaccaggagtttgagactagcctggccagcatggagaaaccccgtctctactaaaaatacaaaaattagccaggcgtggtggcgcttgcctgttatcccagctactcggggaggttgaggcatgagaattgcttgaacctgggagacggaggttgcagtgagatcacactactgcactccagcctaggtgatagagtgagaccctgtctcaaaaaaaaaaaaaataaaaggcttccagctccatccaagttgctgcataagacattatttcattcttttttatggttgagtagtattccattgtgtatatatatatatatcacgttttctttgttcattcctcagttgatgggtacttacattggttctatatctttgcaattgtgaattgttctgtgataaacatacgcgtgcaggtgtcttttcctttgggtagatacccagtagtgggattgctggattgaatggtaggtctacttttagttctttgagaagtccccatactattttccatgaaggttttactattttactttccccccagcattgtatatgcgttcctttttcactacatccatggcaacatctgttgttttttttgactttttaataatggccactctgacaggttaaggtggcatctcattgtggttttaatttgcatttccctgatgactagtgatggtgagcattttttcatgtttgttggccatttgtagatcttcttttgggaaatgtctattcatgtcatttgcccactttttgatggaattatttgtttttttctcactgatttgtttgagttccttgtagattctggatattagttctttgtcagatgcatagttgcaaatgttttctcccattctgttggttgtctgtttactctgatgattatttcttccgctgtgcagatgcattttagtttaactaggtcccatttatttagtttttgttccatttgcttttgggatcttagtcataaatgctttgcctttgacaatgtcataaagtttttcctaggttttctcctagaatttttatggtttctggtctagatttaaatctttgatccatctcaagttgatttttgtgtatggtgagagatctagtttcatttttctacctgtggctatccagttttcccagaaccatttattgaataggaggttctttccccagtttatgtttttgtatgcttttatggaaggttagttgattgtaagtatttggccttatttctggtgtttttattctgttgtattggtctgtatatctagctttatatcagtacaatcctgttttggttactatagacttgtagtataatttgaagttggagtaatgtgatgccttagaattgttctttttgcttaagattgctttggatatttgggctcttttttggttccatatgaattttaggattattttttctaattgtatgaaaaatgatgttggtattttgataggaattgcattgaatctatatattgctttgggcatatgatcattttaatagtattgattcttctaatccatgagcatgggatgtatttccattagtttgtgtcatctgtgatttctttcagccatgttttatagttttccttgtagagatctttcaccttcttggttaaatatatttccaggcatttgattttttttttttttttttgcagctattttaaaagggactgtgttcttgatttgtttctcagcttagttattgttgatgtataccagtgctactgatttgtgtacattgattttgttacctgagactttactgaattcattgatcaaatctaggagtctttcggtaaagtctttagggttttctaggtatatgatcgtatcattggcaaacagagatagtttgccttccttttttccaatttggatgccctttgtttatttctcttccctgattgttctggctagaccttccagtgttatactgaatagaagtggtgaaagtggacatccttgtcttgttccagttcttaggggcaatgctttcatctttttccccattaagtatgaggttggctatgggtttgtcatgtgtggcttttactattttgagatatgttccttctatgcccagatttttatcataaagggatgctggattttgttgaacgttttttctgcgtctattgggatgatcatattttttttgtttttaattctgtttatgtgatgagtcacatttacttgggtatgttgaaccatccctacatcctaagatgaaacccacttgattatggtgaattatctttttgctgtgccgatggattcagttttctagtattttgttgaggatttttgcatctgatgttcatcagggatattggtctgtggttttctttttttgttatgtcctttactgcttttggtatcagagtgatactggcttcatagagtgaattaggttagagttaggtaggattctctctttctcaaccttttggaatagtttcagtatgattggtgccaattctttgaatgtctggtggaatttggccatgtatccgtctggccctgggttttttgtttttttggcaatttttgttattgattcaatctcactggttgttactggtctgttcagacctcctatttctttctgattcaagctaggagggttgtacgtttccagagatttgttcatttcctctaaattttcttgtttgtttgcacaaaggtattcatagtgtccttaaatggtcttttgtatttctgtggtgccagccataatgtctccatttccgtttctatttgagctaatttgaattttctctcttcttggttaatctagctaatggtctatcgattttatttattttttcaaagaaccaacttttatattttgatcttttgtttcgatttcatttagttctgctctgatctttgttatttcttttcttttgctagctttgggtttggcttgttcttcttgagacagggtcgtgctgtgtcacctaggctggtgtgcagtggcacgatcactgcagccttgaccttcctgggctgaagtgatcctcccatctcagcctcccaagtagctgggactacaggcatgcaccaccatgcctgactaattttttaatattttgtagagacagtatttcaccgtgtcgcccgggctggtctcaaacttttgggctaagcaatcctcctgcctttgcctcccaaagtgttgggattacagttgtaagccaccacacctggcctagttggttctgtttctctagttctttgaggtatgatgttagattgtcaacttgtggtctttcagacttttcgatgtaggcatttagcactgtaaactttccttttagcactgcttttgctgtatcccagaagttttgataaattatatctctgttatcatttattttgaataacttttaaatgtccgtcttgatttcattgttaacccccaaatcatgcaggagcagcttgtttaatttccgtgtatttatgtagttttgagggttccttttggaattgatttctagttttattctattgtggtctgagaagatacttgatatagttctgtctgtctgtctatctatctatatctatctatctatctatctatctatctatctatctatctatctgagactgagtctcgctctgttgcccaggctggggtgcagtggcacgatcttggcttactgtaacctctgcctcctgggttcaagtgattcttccgcctcagcctcctgagtagctggattacaggcccctgccaccacggctggctagttgtttttgtatttttagtagagatggggtttcaccatgttggccaggctggtctcgaatgcccgatctcaggtgatcccccatcctcggcctcccaaagtactgggatttcaggtgtgagccaccacacccagccaatatattttgatttttaaaaaaataaattgagacttgctttgtggcctgccatgtggtctgtcttttcttaggtctagtaactgttttgtgaatctgggagcttcagagttaggtgcatatatatttaggattataatatcttcctgttggatcgatccttttatcatcatataatgaccttctttgtcttttttttactgttgttgctttaaagtctattttatctgacataagagctgttctgcttgctttcggtttccatttgcatgaaatatctttttccaccccctttactttgattctgtaagattccttatgttttaggtgagtctcttgaagacagcaggtatttggtttgtgatttttttttttaatccattctgccaatctgtatcttttaagtggagcatttagatgatttatattcaatgttaatactgagatgtgaggtactatcccagccatcatgttgattgttacctggatattttgtgttctccattgtgttactgttttataggtgctgtgcattttgtgctttcaagaggttccatgctggtgcctgtcgaccttttatttcaagctttagaacttttagcctcaatttatttttaaagattatatataaataagggaaaacagaaattctctaatactgtgctcaactgagtggaccgtgtattagttttattttggattaattattgtcacaagaaatctgacgttttaggagttttgagaattgctaaggtctgtaggtgatttttccagactgatgatatttcccatcatttggccacagtacaggaagcgtttgctatagttttatttcttacttgaagcagtaaataatttaaatttttttcttggtaagaaatgttccatgcctaatttgagtgtatttacccttatttgctaataagcagtttagatgttcgtaccctgtcttctatagaaattagaattatacgtataatcccaaatcaaaatgtaattttgagcaaatgtgctaattgatttatgctagacagattgacctatgtgtgattcatttttcctaggagaaggaaagagatggttgaaaagaaatatttatttggtaacttatatattgatgtaaaaatggcacagtcttggtcttcagatttgtgtttgtgtaaactaaaataaatagtaaagtttcacagtaaagactaccaaatgagtggttaaagcacctggctcagggcacagattgaatcctagcttagactctcagtggttttgtgacactggacaagttaattaacctcaccaagccttatttacccacctttaatgtgaaactaatggcagtacctgcctcatggagtttttgtgaggattaagtgatacaatgtgtgtaacatgcttagctccgtagaaaatggtgaatgaatgttagcccgtttcactttgctgttgctagtgtcgtcgatgtgttcatacaaaaaactgagcatgtctaaaatgtccaattattttaatgttgaaagtaatggacataaaaggtgcattaagcaattctagtttctgtggccaagacacatcaaagaaatgaagaatttaaaaaataggtgattgatgaagattaactttattcatgtttttcctagctagacattagaagcaaggtaaggaatttaaaataataatattcccttaaagttgctttcctaggtatttttagcattgtataatttaagtattatagattcatgcagaaatcctttatgttttacagagttacactgttagaccttatgatagccaagataacgagtgatgagccactcaccaaggatgacatccctgtgtttttgcggcatgctgagttgattgcaagcacctttgtggatcagtgcaagactgtgctcaagctggcctctgaggagcctcctgatgatgaggtaagggaggcagatttcccaatctcgggtaaaagagaatggacagattttctaactcagccaagtcctgtatgagaattcttttttaaaagctttaaaaaatattatgtaagtaatgtatccatatatgagaatagttggaaaatttagataagggaaaacagtgtccttattcctaccatccagagtcaatgacttaggcaaattctggttaattttctagacagatgacatcagatacatgcacacagacgtagacatgtgcacatatgtatctattaaaagtggagcctttctgtgccttctgtttgcaggttcccattttttcttcggaatgtaagctctaggagggcagaaattttgactgttgtgtccatagtactatgtatatggtaggcactgaacaagtatttgctgaatgaataaataaataatacattgtaaatgtctttttaaataaatgccaacataggctgggcacggtgcctcacacctgtaaccccacttctttgggaggccaaggcgggaggatcgcttgagcccaggaattccagatcaccctgggcaacatggtgaaaccccatctctgtaaaaaatacaaaaattaactggacatggtggcacatgcctatagacccagctacttgggaggctgaggtgggagggtcacttgagcccaggaggttgaggctgcggtgagccatgattgccccactgccctccagctcgggtgatgcagtgagacccttgtctcaaaaaaaaaaaaaaaaaaagccaacataacatttcaagtaaagaatttcctatttatttgtccaaatccctgtagttggacatttaggttgtttgtttgtttgttttgagacaaagccttgctctgtcgcccaagctggagcacagtggcacaatcttgactcactgcaacctctgcctcctgggttcagtcaattctcctgtcttggctacccaaataactgggattataggtgcacaccaccaccatgcccagataatttttgtatttttggtagagacggggtttcggcatattggccaggctggtcttgaactcctgacttcatgtgatctgcctgcctcggcctgccaaggtgctgggattactggcataagccaccacatctggcagtaggttgttcttatttctacttattttagataatactgtagtacatgcctttatagttacatctttgcacatttccacagctgttatcctaggacataatcttagaagtgaaattgctatgtataaggatatcacatgtttaaagctcttgatacatacttccaaactgctttctagacagtttgcttcttctcttctttataggagattcctagtggtatactgtcctggttaattatttaaactattttttattctccttaagcctaccttagatcattcaggtcttgttttatcagggcgtggaagggagcttatgttaattctctatcccttgtctttacttcagaacttcctgtttttatctattctccctttcttctgtcataaagttagaattgttctttctctggaccactcagctgtaaaaagggatgcacttgtgatacaacagggaagaatctcagaagtgctgagggagagaagccagacagactagaaaacatgctggctgattccatttccgtgggattctgtagcaggccagatatatcggtcatgacagaaaatagatcagatgtcacctgggtctggaaatgaatgagtggaattgattgcaggggaacacgagggaactttctggatagtagaatgtggcacttagctgtataccttgacacaactttgtactgtatgcttaagatgggtgtatttcattgcatgtatattatacctcaataaagctgatttaaacaataaaagatgatagagagttcctttgtatgctgatatgaatggtcaggtagagagggagtaattgatgctggaatcactgttggcaaatgggcaacactggaggagagggattggaatccagagtggatactcatccactgtccacaggcgggaatgtagagaatgtgatccgatactgtgaaactgttaactcctgttgtaaatgcagctcatggctatgactgctcgcccacgagagtgtatttccttttttgtgaatatactttcgttcaggaccattttgatattgattttctgtgctttgtcatatagaccatgttagatcttactaatcatttcgttaactttagttctcattttctgtgataggaaagaaaggtctttattcaggggcttgcgtttactttctggagatagatttgcctttgtttccagcaggaggagcagtgagtcatgcttaagaaaagttttaaaaattctctaagagacagagaaaagacagatcacagctttaaacttttcagggcacttctgtttaaaatataggtgatttcagtattgtagtgagaaattcctggtgtaacttttcatatttaggaaaacttctatttttcctttggacttttttctctaagatgggaagtatttttatatattaatggaatggaaagttgtagactgggaacagtggctcatgcccgtaatcccaatactttgggacgccaaggcgtgggaggattgcttaagcccaggagttggagaccagcctgggcaacataaggagactccatctgtacaaaaaaaaaacacaaagaattagctgggtgtggtggtgtgtgcctgtgttcctagccaccggtgaggctgaggtgggaggcttgcctaagcccagaagattgaggctgcagtgagctgtgattgcgctactgcattccagcctggggaagagtgagatcctgtctccaaaaaaaaagaaaaaattgtaggcagttttcttttgcaaagccaaattaatttacttttggaagtttattgagctatacatttatgacttgtgcgtattaatgcacatatgtcatactttttttttttttttaaaagaggaccactttgccagtatttaaatatgccaaagaccaagtgctatactggagctggcctgtggtgacttctaagagttgattattaagtgcttagaaatttgtgagctgattgttaaattgttggtaccttgaaatcatccatggtggaagtagttgtgccatggaaaccagcaaatgctacaaatcagggttttccacctgcctcttccaccccagccattcttctgccaaaccactgcatttactcattggtgatctttttaggacaagatagatattcagtaaagttctcaatgctatgactgaaaagtgagaatggaaacagttgtatttatagcatgtgttttttaatttatgtaattgtttggctttaaaatcccaaggttttcttcatacgtttctttataaaaatagttttgggttctcatgttaatgtacttattcctgtcttttgatatattttgtatacttgtttccagtttttgatatatttttgtcagttcagaatcttgttcacttgtagcaagccttgccttttctctgaaagctcaaaaaacattccttttagctttgtattttctgatatccatatattacaataattgttgccaggttgtgggatttgcattctgttttaatctttgcaaccccaggttaggccatactgtagtacctgttatgcagtaggtattacatatttaattacataatacatatttaatacatattctacaataaatagtgtattttttccacatattaagggcttaaatttttgtattacgcaaataatgcttgctttgttgttaaaaattatttaagctgaagtcagtgaaacataaagttacaaagtttcagccaggcgtggtggctcatacctgtaatcccagcactttaggaggtcgaggtgggcagattgcctgaggtcaggagtttgagaccagcctgactaacatggtgagacccccgtctctactaaaaatacaaaaattagccgggtgtggtggcggatgcctgtaatcccagctactcgggaggctgtcccagctactcgggaggcggaggcagagaatcacgtgaacccgggaggcggaggttgctgtgaactgagattgtgccattgcacttcagcctgggcgacagagcaagactcccatcttaaaaaaaaaaaaaagttacaaagttttcccctttttgcccagcctccatttgttttctatagatctgcatatccttttttttttgttttcttttcaaaggtctttttttgtatatacacacctatatgttttttgttttcattttttgcactattcttcaacttgctgtttttacttatgatgtaacttgtacatctttgcactttagcatgtgtatattcattgtatgtttttaatagttgaataatatttaactatatagactcatcataattttttcatttgttccctatagactttccagctgctttcaggttgctttttttttcttttaacctttacaaataatgttatagtgaacatccttgtacaaatttcggttaagtaaatcaaatccaggttataaattcctggagttgaattgctgggttgaagaattatgtgtatttaaaaactttagagagatttctaagttgcacatcagtgcaacacaagattgcacgagttgccttttgcagatctgatttaattactatttctcgttaatgtttttcagtgaccattatgtttgtttttgcatattaggttactctttaaaatgcatttattaaaaagcattttctggaaattagtctttctgtcatacatacagtaaactattgtttacgtaatttttgtttgaatttatttctgatgttctgttagccttgtagtcgttttttgtttgtgtttaatctagttgaggttatcaattttatccttctggcctctggatttttttttttttttttgacaactgacagccaagaagatttttgtttgtttgtttgttttttaagtaaattctccacttagattgtggaaatacaaacctacatagtctagttctttcagtacttagttctcattttttatttatctagaatttatttttgagtaaggagtgagttatggatccaaatgaattatttatgtcttttgactatccaagattataaaatcttttggtgtgagactgactgggtttgaatcttgatttcttctgttacaggcatatgatcttggaaaagttacttagcctctctctgcccttctttttcttgaaatgggttatattattattattattattattattattattttgagatagagtcttgctctgttgcccaggctggaatgcagaggtgtggtcttggctcactgcaacctccgtctcccaggttcaagcgattctcctgcctcagcctcctgtgtagctgcaggcacccaccaccatgtccggctaatttttgtatttttagtagagatggggtttcgccttgttggccaggctggtcttgaactcccgactttgggtgatccacccgcctcgggctcccaaagtgctaggattataggcatgggccaccgtgcccggccaggttgtattttaatataaacatttaatatacagattggtacatagttaatgttccctaaatgttatctgttattatttcagtaccatttagtgaataatcttatcctttccactaattttttttttttaattgagacagggtctcgccctgttccccaggctggagcgtagtggtgcagtcgtagcttgctatattctccaactcctgggcttgaggatcctcccacctacctatatcatatcctaaattcttttatttatttggatcaattactggttccctccaaacaaattggagggaaccagtaagatgttaacaactggagaagggagaattcagagaggtatgtgtttatatgccataaaggaacactgaaatgaacacacaaaaaaatgcagaaactgatctatcaacaaagtagttgcagtccaggcagatataactaatttgcattttaatggacaggaataattctgtattaatataagttttctgtaacttacaaagctgtaaaattgctcaaagatacgaaatgacagtgttaactgagacaggtgagctagacaggagactaatctttttttttttgctcacttcaaaatctttcacgatgttcccttcatttgcttgtctttttttttttttttttttttttgccctagtgcctgatttaattaatattagtttcataagacttttaaatatctggaagggcattttactcattaatcttattttttaagacagtaatttttcctggctgttctttcgttactaatttccagatgctcattagaaacactttcttaataaaatgattttaatgagtaaaattgtgaatgtgttaggtggggatagattaattttcttttaggtttattttagttaatatcatagaatttaagagctggaaggagacttccagttcatctcttccaacctctaattttatttctgtcattttaacgtggaaaatttcaaacatagactaagaagaaagtgtacttatactccatatgccatcccctggcttcagcagcttccccttcatcaccattcttctttcctccacagttccactcattcttatgccagttgccgtggactgaatcaaagctccaacatatttcatcagttactctaaaagataaggagttttcagacacaagtataatatgaagaaaacatctaaaataactaataataacatttattatcaaataaatagtattcagatttcccccattgtctaataatctttttcaagtttattttgttgaaacaccttacagataagggccaccttatctgtaacaccttacagataagggcaagtgattgacataactttactccagtgtataggttcccctttcctcttctttttttcctctttgctacttatttgttggagaaactgggttgtttttcctgtagacttttctagattttagattttgatgagtatgtcttcagggtggcacttaacatattcttctttaccttgcatttcctgtgaatgaaaattcgttccagaggcatattcagatttgggttagttttttttgtttattttttgcagtagtgtttcgctgttgatgatactactttcgtcaagaagcacatgaggcttggttgtctctgtgatattagcagtcattaatgatcacctagatccatgaattctttaggggttgcaaaatggtggcattttaacattattgttcattttttgtttattagcaggaatattttttaaagagaaactttccctaaccaattcttaggttctgtgaggtacactggatgaagaaaggcaggataagtgctcgattgttttccctcttgattaccaatcttcagaataatgagttggttttgtggcatcattcaaagatgaccagtgagttggtttgttttgttttattttcattatgaagccatagctgtaaaaccgcttgatttgttttcagtccgttaccgttgtaattctttctgatgtttaatgtgccactgctggccggtgggagcctcatcaagttgtttctgattccgaatttctgacatgaccctagtagcctgtaatagcgtctttgttgtctgctatgacaagatgtccagggttaccttttgcatgggctgtcccaggtctgttcttgaaggagcagtggtatctcacgataacaatctgggcagctacacctttaacaaaagaggttgatgaagctttgtgaaattgatggagttggtcaagactcgttttaacatggtactactaatctagacttctaatctagattttcccacttaactctttagcaaaagaaggctatgatataaaattaaagatccaagacattaaaaatatgagttgttttttgctatttattttgagatttcagaatactatattaatgtattacctttaaatctcttaattagaaaacagtaaatacacatttagaactaacaaggaagtaatttgtctttcttttgaagaatgttatctcttttttttttttttttttttttgtttgaggcagagtcttgctctgttgcccaggctacagtccagtggcgtgatcttggctcactgcaacctctgcctcctaggttgaaacgattctactgcctcagcctccctagtagctgggattacaggcacccaccaccaagcgtggctaatttttatatttttttttactagagacgggatttcaccatattgaccaggctgatcttgagctcttgacctcaagtgatcttctggcctcggcctcccaatgtgaagaatgttatctttatggactaactttataatctctgccacattttgtcaaatgatgggtactttaaaaatggggttcaaaatctatacaaaagttacatttaaaatttttgtatagactacttaatgctatgcagttggtactgggtagtttcttggtcatgcagtgtatttgataaattatttagtagctatgtgaagtagcattttcaaacagtactgtctttctaatctaccaagatattgcatagaagttcatatttacccagaaattatgcaagttcttaaagccagagttttttcaaccacagcattttacaggatttctgtggacaagaaattaatgtattttatgggatatttgtatctttaaagtggaatttgcatgctgggaatgctttaaaaagaaagtatttgcataaatgtcatgtacatagctagtaattttgaacatttattccactgttggaatgtctttttgcttgaataagaacttttctgactctttgctccaagaagacacataatgacacataatcttgcattcttgatggcagatgtctgctgttagtgaaaatgatgagtcgtgtacatatttcatacttctgttttgttcttcatagttttgtttttctctttgacttattacaagcacagactctttaaatttattgaaatattttattctcttacagttatttataacagttaaataatttctcttaaaatatgctaaaaagttatgttttcttttctttctaggaggcactggctacaattaggcttctcgacgtcctgtgcgaaatgactgtgaatactgagctgctcggctatctgcaggttttccctggcttgctggaaagagtgattggtgagtgaaatatcacacattgtatttttagctaagaaatctttggcttgtcatactgtaatataaatccaaatacaaatccttaattttcagtgtactttgggaattttgtgaatatatttttttgagaggaatcacagtgttgtaacagttcaggcaggccagataaacctgagcccatgtgtttgttcagccacttcccttctgttaactgaagattccttctcagtaatgtgaggataacaatgcctgttatgcatatagtagatgtttcatcaatataggatgtgatgaagaaggtggggcaggcaggtttgcgatgatgattgtggttttatattactatagctttgtaaaatgtggcagtaaatttttcccatttacatttagtgaacacatagaatggtgttttatacatattatatatacaaatcttatgagaaaaaggttttaaacaagaaaccattgttaaaagtattaccaaccttgctaaaaagctgtttgcaaaataattcaagtagaacctgttccttgtggctagccatgcttaggtttgctgttcattatttgcaattttttcctttaaaaagatgatacttactctggagaccagtgtcctgagaaagatgactttgtgtctagcagtatagatgagctagcagtcagctgtagaggaagatccttagaattcctcatcagtgttgtattttgagtacattgcttttagtgataatttaaataaaacaccacaaacctagcacacttgagtgattatggaaggagcctgagtttggagccagggtcgatgtgggttgccatcccagctctgccaggtgccaacttttctgagcctgttgttttcttcattataaaattgggaaagtgataccttcctgtataggtttgttgagagggttaaatgagataatgtggaaacactgaaatgcagttcctggaagattgtctgttttcattggctgcctggaggtgctcatagagtagagcagtggtaagttctttctcctgaatgtagctggagtgaagtatagagaacatatgctggcttctgatgatttggccagttggatgagggaaaaataagcactcttcttggtttctgtcatatgcatcattatggatagatattgtgttttagacttcattgactgaagttattagaaaagttctttcataaagaagttgagattggaaacctttttgtaagaaggatgctagcaaacttttagctaactttttttgtagataaatagaaactctgagttggggtagtcattatggcttatctccccaaaactagagtcaaaaaatttaaagcaaaggcagaagagccttctaatcattttttgaagcaaaggcagaagagccttgtaatcattatttaaataaagctttctgtgctctacctttagcctattacaataaattagatttgtctatggaaaactattagtacaacatactaaaagttacttttctgtggaaaatgaagtttactcttttggttatagatcttttgcgggtgattcatgtagctggaaaagaaaccacaaacatcttcagtaattgtggttgcgtgagagcagaaggtgacatctccaatgtggccaatgggtttaagtctcatctcattcgtctgattggaaatctgtgttacaagaataaagataaccaagacaaggtaagaggatttcttagtatgtattatacatgtatggcttcatttagaatatagtccttggaagacattcactcttttggagtgaaagcttgaggtgcttagaaagtagcttggatagagagatatatattttatatgaatacacacacacacacacacacacacacacacacacacacacatatatatacacacacacacgtgtgtgtgtgtgtgtatatatatatatgtatatgttaatatataggctctttggagcctagacaaatttctaacacacagtagatatttaataaacactagttattattgcctattatcttaaaaaacaaagcttagatctatatcctatgtttatggacgatagcatcataagccttttcttctagatgttttaaaatggatataaaaggaatataatatttaagtatgaagtctttgaggacctagtaggctgcttttagaaacctcttatgtgcagaagagcttaaaggtagttatattgagaatgtgagagaatggtaagaaagatctcagggcagttggaccacatgcttcagattgatctcgcctttctgtatttttctggagttttacttcgggtggcatttgatttgcttagttaaatattaattaaatttctgccagattatatttttctaagatggtggcagaatgtcttgcattgtacatgtgtgtctgcagtatgactttgccactcccctgtcgagggttggcatctatttctccatccacttgaatctgggcaggccctgtggctgctgtgagcaatcaaatatgtgatcctataccatttgtagcatagcccttaactggtctagctgattctatttctggcttcttagaagcccgtcactatgtaagaagtatagattcccagagatcaccttgctgcgagttgctgaatacacatggaaaagccctggaagataagatacaatgaggagagaggaaaggtctggtgaaggaacatcaaggcatgagatgtgtgcgagaaaccatcttgggagtagatccatcctcagtttcttacttgcccagctgatgccacatagatcagggcccccctactgggcatagtccttcctgaatttatgacccatagtattatgagaaaaagtaaaaaatagaaaaaaaaaataagggatataggtcctgcttcagttagtagcccagtcagttactgttggactgatccttcttcaaatagcaattataaactttggacaaaaaatagccatgtgaagacactcgaatttgacacaaacgggcagattctggagtgaaattgatgcttggaagaagggaatgacacagtgtgtggcatgcagggcagtgaaaagtcagttacaaaatcttccgtctttctagcttgaagaatcaaagaacagtttgagggcaaccatggcattggaaagtgaggggggaattgtggaaagtagaaaacagaccccaaactctgggtgtcagctacctaaatctctgctaatggctgaatcacacgtgtggggcaggctccaggcagctaagctaaggatgaagtcattgtattgagatttgagctcccaccctagagtttatagtattaagtccaacttacactgtagataattaataattgccctctaaaaaaaaaaatcaacactctttagaggaatataatataatccagaattgccacagcataatgtatcctgtaatgtccaggatacagtttacaattgcttgacgttcaggaaaatgtgacctgttctcaattgaaaagatgatcagcggagactgactgtgagaggacacagatactgggcttagcagacaaggattttaaagtaccaaatgtaaccgtgctcaaggatgtaaaggagatacgcttcataagagtgaaaaggtgggatatctcagcagagaaatagaaactataaaaaagaaccaaatggaaatcctagaactgaaaaatacagtatctaaaataaaaaaaaaaaaataccgaatgtgcttaacctcaagaaagatcacagaggaaagagccagtacactttaagatacatcagtagaaatcatctagtctgaaaaacaaaagcggggagaaagattgaaaataaaacggccgctttaggatgctaaatgttagggtaatttgttatgtagccgttgatagctggaataattcctgtgagacatggcgcagaaccaaacgctagacaacttgcacttttagtatatgggcgcaccattttggcaatcctcatcttcaggagagtgagactactgattccccccttgggaaattactggactgatttttgcaaaagaaagttgatagcgaataaagcactttacctttttaatgaccaggactgcctttcttgagcacaaaagaggtggtttttcttgtgtttaactattcttttgttgctaatttggactggcctcttataggaacaaaatgcagtaacccttaaaaggcttgcgaaataactcactgaagtcaggatcagattgcaccataagtaaatatggagtgtgcccaagtgctgctgtgcagaggtcactggggcgcacaggaagtcgatggtgtgtcctgtcacttgtgcagttgctaatagcactgctgatttctcagcaaacagtttagagggtatgaaggagttcattctttgagtatcaactcaaatgccctctgtttctctcagtttcttacgtgtgtcaacaaaaggcctgaacctgaaagcattacctctgggatttttttcctccttccaaagaccgacacaacgccgaaatcttgttctggatgtgctagagtgttctttattcttgtagccaaatccttgttccagctgggtgttacagatatttgccttgctcattgttgcctcaagggatggaattcactcgcactcagatgactttggttatagttttgggaaaatggaatggatggttatgtagcaggtctttatcacgggaccagtaattctcagtgttttgtcttgatggattgtctcacttctaacccagctagggctttaagggaaatttggctctgtctctgctccaagactaaagatctgagttgggagggatttcgtatcatctagcctaatttgggttcctcctttgcccagaagacaaaagggactgatgatttattgtttagtgtttactatgtccttgcattgtgcttagtgaattacatatattatcaactttaatctttgcatcagccttgcaaagcaggttctggtaaccacattttaaggagaggccatccagttaggtgcagagcccagggtagaatttggatttgtttgcctattgagttcccaggcctgtgctcacttcctgccccatggtgagaacttgccaaaaggttggagaaaagggtttaaaatagacttcctgcaggacttcaggctggaggctggtcagtctgcgtctcctaggccagccaggccccttagactccctcctggttgaagttgggagctcttgggggtcctcttatccttgtttctgattcacccattcatcaaatacgaatgtttgctggcttggggatcctttgacgggtaattcaggcaaggtattaatatcttctgtggagcttccattctggcatcatctggggaccatgcttgcctctttgaatcagaatctcaaaactactcatgacacagattttcctaaaatctttgtgtactgcctgattcctctgaattttgagcaagactctttcaagcccaactgtgtctgtgttgtctgtgtaacttcatccattgcagtgagtatggtgcccacctgctggatggccctcttacacttgtgtggcactttccattttccagagctcttttcatctgctttagtttgttggagccttatgatacctctgtggaaagggctgaaaagatatttccaccatcattttctaaatgaagaaaccaaggccccgagaccaagtgtgatttaactcagctagcacttgctgagtgagaattgccgtgtgctgcatgctctggagaagacagtcgctttagtggtggaatgacacatgtccactaggagctgtagcaaaagtccgtgtggtgaggcctgtcagaaaggaacaggggggtgatgtgtcctctgggctggctgtgccaggagcatttctctctaaggacaggcactggactgccaggagcatggtatcaactggaaggatggtcatctttctttgagatacttgtctttgggcaagatttaagagaatcaaggtacgttgcctcagattgaaaatctgcacagaaatgtattttatcccaaattctcatgagtctttaatgcttaagtctgtacacgtgatagatgtagtgtttcctgaattgtaaaggaattgctagacttccctttacctcgtcatggtagggaggtgtcaaatccttactgacttctattcttaccttgtttttttgttctcgacttgtgtagtatttccttgctacaactgtagtgattagtttacttctaaacttttgtggacctaaatggagattctgttttggtttctattgtaagaagcacaaagatactaatgctataaacatgaagaaagcattcttcagcttcttctttgttagaataaggaatgtatggtttacctttttcttccctattcttcttcttttcactattgtcataacctctttaagtgaatctttattagaagaaaaaccaaacgtttatttcataaagctaagtgcatttttcaaatcggacagacagatgatctagtttatctaccttccgcccgccaaggaaattgtattgactaggatgggccatatatccgttctgctaaaggttatggaactgctattcagtttcttctcctcctccttcctcctccctgatttaaaatattcccagcagtcacatacttgatgatcccatgtcaaatatatgtgcctataaatcttttactataagcataccttaattttaaagtaagtctgtactgtatgaaaaagttcaacatgtaaagacaaactttatttggccccttcagttctcaattttgaaggcaggttcatttatatacataaaataatctttgtaatacatttttcgttaactttgtgttgctcatcatgttactcccagcatctaaattgtacctggcacatagtaggcattcagtaaatttttctaatttttcttgaatgacaatttatttgtaaaataaattgaatgttgaatgtttactacatatcaagtgcacttttaggttctgaagatacacagcaagtaagacagttcttttcaaggagtgtaaatattactatacaattttctgactaaatttacaaagactagtaaaaatagataacttttcaaatgaaaattaatgttcctttaaattctgagttctgtatttttgaaagtctttttttatgtttgaatatattctaatttactgtaatttgccatcgttttatttgatccaaatcatatatattttagattataagaacatctgtattgtataatatttgcaagtaattaaaaaatattttttaaatcctaggtttaggcttcgtagatctgaatgcggttttttcattaatcttaaataaaatttaagactgaatttacagttgttaaacattcataacatgatcaatttttagtgggttttttggtggggtgtactattttccaccctttttgtatctagttgcaaggagccaagaacaggcaaattattaactcctttattatttcctcctgtctgaaatgttttcaagcagcgtatttgtctgttaaatcatgaaaaactgaaaaaaaaagtctatggctatttcctaatgattttatttaggttgttgctcttaatgaggattagtacctgttttgtacatcagtactggctgacttgtcagttactcggataattgatcgagtgattgctctgcagagaaataaataaatgcttaactaatatgtgttagtgtttttctttttgcaactgtaaaataggccggggtggcatggcccttggtgctcaggcagggccagcttctatattctcagcctatactagcactgtgtggacttcccaaccttcatactttccctgagtgaccttaacttggccttcagaactcaaggtcacaggtaccctgttgacctgtgcagaaacactttctcttctacgctcctcactatactcttctgccctctgctcaccccctgacttacactctacctataatcagtttctgtgggtaaataggttatgggttgttgattctgatgcatatttcagtatacgtgtgctgttgtttttggttttacttaataagtgtttagtgtgatacacatacgtaaactgatcaccagcagaactgtgacatatgaaacactttatttgggtatcactcaattttactgtagcagcctccatcccttcttagttataccaccgttaccaccacttttgtccttgctcctcccttgatgttttgtctttcatgaaacccatctcccaaggtctttctggatgataatggcttaattcactctctttcccagatacatgtttttccttctttataggaacctaactctgcctgtctaattggggaattccaggcagggtattgaaaatgtctggggggccgggtgcagtggctcaagcttgtaaacccagcaagcacattggaaggctgaggcgggagattgtttgagctcagaagttggagaccagccagacaacataataagactccatccctacaaaatatttaaaaattagctgagtatgttgatgcatgtttgtagtcccagctgtttgggagactaaggtaggaggattgcttgagcccaggaggtcgaggctgcagtgcaccgtgattgtgccactgtgttctagcctcggtgagggtgtgagaccctgtttaaaaaaaaagaaacagaaaatgtctgagcagtgggttctcctgtcactgacttttctgtcattgcttggcttgtaacattggatccacgtgtgtgctgtttatagaggaaccttacaacaggcagagagcttatgagactttagagttcagtaaactcagagttgcctcttagttgaccatctattaactgtttaaatttggacaagtgtctcaacctttctgaatctcagcttcttcatgtataaaataggggcagttacacctccttgtggggttgggaggattaaatgtgatcatgtataggaagtatctcatgtctgtaatcctagtactttcggaagccgaggcaggaggatcacttgagcccaggagtttgagagcagcctgggcaacatagtaagacctcccatctctaaaaaaataaaataaatagccggtatttccagttacttggtggggccaaggcaggaggatcgcttgagcccaggagtttgagaccagcctgggcaacgtaataagaccgtttctctaaaaaaattaaaaaattagccagtgctcccaggtgcttggggggctgaggtgggacggttgattgagctcagtaggtcgaggctacagggagccgtgatcgtgccactgcactctagcctgggcaacagagcgagactctgtctttaaaaaaaaaaaaaagtatataatggattgccttatgtctctaactataatacttccgtgtccctcctcttaccctccctaccagtccctttggaattgaaaagatctagttcattccagtgtctccccattatatgtatttacatagaaatttgtagacaacatttcacaaggatttgcaaagttcaaagtaaacctcatattctgcattctgtgtgtattactttttctaatagatggggctttatggaggaagtaaaatgaaaacaaatatgagaactttctttaggatgagagtaattttgattcttgtcataaatgttttctgacttgaatttctcttatgttattatctagtaaagagctgaagtgttttccgcgtgaattccaaaatctgttctagctcaattctgaaagtatgttaaggaacttttaaattacagggcatatgtcttacctcaattggattgtgcgtttttcctgtgtttttcctcttgtcagaagcaagttgcaccaaatctcagcttattgatttgaagattgaatgtataggcaagatctggcttgcttagaattccacttctttgtaatgtaatcccagatcaagaaatatgtcaaaattcataaatcaaactgtcaccattagttccctgaacttacagttcctgtaacagtaaatgaaattaaaattcctatctagaggaaacctatcatggtttaggttgttgcagctgtaaaattttttttaaaagactaaaggatggtctaccatttgactccaaaaaccccttttctatgtcttgttctacaataattgacttattctcttccaggaaatgcataacattatttaaaaagaagaatgatactaattatataattgcaatgtaacagcgtactattgtcgataaccattactattgcaaactaactaggctccaggcccttgacctgtgcttcatcgtggaattcctaccactgcatattcctccctaggctttaagcgtgaaggcagacacatcatatttggcttaacacctgccgtaacactgggtacatagtgtagtgaaattaatggacgctggatgactttgcttgctttactggtgagtcaagcgtagagtagttacttgcttggagcgatagcaggccaaattctgactccagagcccatacttttcctgttaccatccactgcttccaccgtcaccacaaaagaagatgtttgagactggtcctttgaaatctatgaccaaatttgtgtgactctttgaggtggcaggacattgtattacagctttttccacaattcttactgaacttttttcattatcatctaatgtctagtgttttagtaaatgtagtttcttttttctttccctttctttttttcttttttaagaggtggggtcttgctctgttgctcaggctggagtgcagtggtgtgattatagctcattttagccttgagctcatgggctcaggcagttctcctacctcagcctcccacataactgggactgcaggcatgtgccaccatgcccgactactaaaaatttttttttggtagaaaaacagggtcttactgtgttgcccaggctggtctcaaactcctggcctcaggcagtcctccttccttgacctcccaaagtgctcggattacaggtttgagtcaccttacctggcctgaatatggtttctttaaggttcatgttgagggctacatttcaggcacatgcgtatttccgagaagcataatttaccccatactgtagacacagaaagggagacattggggaagtaatgtgctgcccatgatgattccgcagtttgtaaaagtcatgaatccagttttcctaactgctactcagttttctttacttacgccatatgatcaatttttagataacagacgttttaatttaatttaattttatttttgagacagggtcttgcttttgtcacccaggctggagtgcagtggtgtgatcacagctcaccgcagttctgtgctcaagtgatcctcccgcctcagccacccaagtagctggtactagaggtatgtcaccacacctggcaaatttttgtatttttttttgtagaggtgggattttcccatgttccccaggctggtcttgaactcctgagcttgagcagtctgtccaccttggcctcccaaagtgctaggattacaggtgtgagtcaccacgcccggccgacaacagtgattttaaatggatttgtgtttaacagtaaaaaacaattatttcacagtatccaaaaagaagaatatctgagacttgggtgaggggaaaaccagctgtataaactgagagctgtaccttgttcctgtatggaagtatggaatatgggaaagatattagttatttttaaactgatttttattactagaccaattaaaatcccactgtgaaaaataagccataattttgactataaaatgaaaataattgaggaattgtcatatcaatattaaaatatactttaaggctaaaataatcaaaacaatttacaaaagtttataggttagtggaggcagacatagtttccaaacagacccaggagaagttatacgaatttaccatgtgataaggataatccagcaacccggggagaaaaggaaagcttattacaaaagcttgtaaaaaagcttatgtaaagagtttttctccatgataagaagagaacatgctccgttcattagtgattgtagtaattctttctttcttctactttcctgtttttttttgagacagagtcttgctttgttgcccaggctggagtgcagtggtgtgatctcagctcactgcaacctctgcctcctgagtttgagtgattctcctgcctcagcctcctgagtagctgggattacaggcatgtgccaccatgcctggctaattattgtatttttagtagagacggggtttcaccatgttgcccaggctggtcttgaattcctgacctcaagtgatctgcctgcagcggcctcccaaagtgctgggattacaggtgtgagccaccatgcccagcctctttgttcttcttttatactttgtacacctcttaacccttctttggccaagatctgggggctttagcaatgacaatttcaattatactttcagttgaaagatttttaaaagtaaaacgttagcattggatctggagaattttgctaactgagataattaatagctgggctggtggtgatagggtttgtgtgtttttgagagagagagagagagagagaggaagagacagacagagatggaaatataaagatcattcttccactgttatatgtgttttttcccctttaaaggaataggcatttgaatttcctctctgttgtcaggtgttctgacttgggtacatcagctcttactgagtgcttgaatgttcaggatttctatgacatatctcaatctaatgaaaatctgactgtgaaatgtctatatatctccccaggcttcgttttcttggttaaatgagaaaagtgctcttatttcaaatgttggaaagtagctctacctttttctggaaaaaaaaaaaaaataaaaaaaaaataataataataataataataataagatgggaaatgtctgtcccacatctaaagcagttttgatctttagcatatttagtttttttttttttttttttcctggcagcagctgaaaattaagaggatcaaagttatgttcctataaaagacttttttcctgtcagtgcttgaaggcattgtctgactccccccacccccacgttttaaaagctgattgcttatcttattcaggtagaatttaatttcatgcccatcatattctaatagaacaaaaatgatacttagtttcagactgtggattttagtttgaattcaaacctactgctatattgcagttaaagttgggaatattttttactccaaatagaaatgaacgtgctattttggcatagtggtaagagcttgtagttcaattcaacaagtatgtgtttgccatatgctgtgtaccagccagtattctagacactgggaatgcagaaatggatttggcctactgttctctcgaggaattcacagtgtaaagaaggagacagatgtagaaactatcatctcagtatcatagaataagtggtgtgtgacaggattgagagccagtagaaaagtacctaagtgcttggtataaatggctctacttggaacttcaggaagaacctcctggatccaggccttgaaggatgaatgagaaagagttaggcagttagaggagtaggtcagccttgcaggcagtgggtgagcaggtgtgtgggacagtgcaggacccagtggcacctgaggggttggggttggggttggggttggggttggggctggggctggggctggggctggggctgtgccagagagctggccccttggctgcacgatgggctctgcactcactgtgggaactaagggttaggccattttcagcgttagtagattccttattgtagctctcatttctgaggattattttgtggttctttttcagatccacttcttttttttttttgagacggagttttgctcttgttgccaaggctggagtgcaatggtgcgatctcgacgcaacctccgcctcccaggttcaagtgattctcctgcgtcagcctcccgagtagctgggattacaggcatgcgccaccatgcccagctaatttttgtatttttagtagaggtggggttttcccatgttggtcagggtggtcttgaactcccgacctcaggtaatctgcccacctcggcctcccaaagtgctgggattacaggcgtaagctaccgtgcccggctgatcaacttattttttattgtgttgtccatcttcgtcttgagtcatttaagacacttattttctcttggagattgtttttatttctagtttttagggtatggtttttctcatttgttctctctcatttccctcttcccttaacccctcccctcctcctctccacccgcggtttcttttcccagtgattttttttttctgtcttttaacttgatctcatcttcttaggagaaacctttttcggcagaagtcccataggtcctggctgtggacttgtattcacagagcgatttgcttttgttttcatctcctcgggtcctagagggtccactcacctcttaccagcttttttttttttttttttttttttttttttttttttttttttttttttgagacagagtctcgctcttgcccaggctggagtgctatggtgtgatctgagctcactgcaacctccgcctcccgggattaagcgattctcttgcctccgccttcctagtagctgggattacaggtgtgcaccaccatgcccagctaattctttgtatttttagtagagatgcggtttcactatgttggccaggctggtctcgaactcctgacttcaggcaatccacccgccccagcctcccaaagtgctgggattacaggtgtgagccactgcgcccatctcagtttttatattaatataatttcttgacttgggattctagtaccacactgacaatgtgactctggatgcagtagctgcctgtgataatggtcttccctggtcccccactgagatgtcgaagcaacccaaaacctttttaactgctacacagagattttgatgatgtggcagcctgtgatggggtcccatcctagactagagtttttcattctttgtctctgccctttgtaagccaaaagccacctacttgtttgcagtcctgaaaactctagcctccaggaaccttgtcctagttggatcctgcatgcctccactcttgtctgcctctctgggttttatttctggcctctgagaatgatgctcacactgcccagtggcaggacgcaacctgggttcctgagccttatggggttaagtgcaaaagtgagtcctgtcagctaagcaggagctgctgagagacgacccacggaggtgggctccagcagcttggcacgtgtaccttcgtggtgcatgggaaattttgattcaggtgaaaaaacagtttaaattctaggatattcttgctttctacccaggcaacacctcacatgttgacttaacttgtgagtctccctttcttcatctgtaaagtagagatgattttacttccctcatacatttattgtgaggattaaattactattgatgacagcagtcacagtgaccttccatgaatgcctcctgcatgtgcttgagtgggatgtttcagaggtgtgttttgttttatctcatcctcttcagagcctgtgcttactgtgtcattctgcctctctaagttaaatgtgcaggaaaggcttcctcaaagccactcagtggtgggagtgctgtctcagtagtcccgcaagcctgtaatcccagcactttgggaggccgaggccagcggatcacctgaggtcaggagttcgagaccagtctgaccaacatggtgaaaccccgactctactaaaaatacaaaaaaattagccagatatggtggctcatgcctgtagtcccagctacttgggaggctgaggcaggaggatcgcttgaactctggaggcagaggttgcagtgagctgagatcgtgccactgcactccagcctgggcaacagagtgagactctgtctcaaaaaatgtcttggccctccttgcaacaggctcttgggcaggcagccaccatgaaggggtgccaagagtatgagaagcatgaggtccatgcctgttccttctctgcctgtgagctgcgagaccgtccctcaacacacaggactgactggctgtctctcacaagccagcatcctggtgctcaggaaagccaggtggcagggcatggggaaggagtaccacctgtggccctgtgctggtcacatgtgtggccctcagaggaaatctccaaccctccaaacgcttgttcaggacttcctgtgcctgcacagtgcttgtaaatcctgcagcagtggcccattcagatagtcagaggtgtggcctgatttctccatgaccctctatccttccgatattttcatcgtgataggaattccacttttaacttttcatttcctttagttcagatctatgtcaaaatgcaaacacaccttggaggggaaatgttttaagccctcatccttcttttacatacttgtatggatgtatttctaatcataacaaactctgattagggggcctcaagagaccaaggaggagcaagaagaggtgtgaaggttctctggccgttctgccttctcactgcctcccaggctctgctcctttccccttccctcctcctggccgcactaagttctggggttggttactgtcatcaatatcttgttggtgtttttcatgctactaatagtaataatttgtgtatatttggaagtacccctgtgtcttttgggggaaaggtattattaacttggtttcttctatagattggaaaaataaaattttgaaccttattcaagaccctgaaaaagtaaactgtttccaaaatgaataataatgaccagagtcaacagtagtgcaggggagcattttatagtgctcactgtgtgtcaggtactcttctgagcccttaaatatatcagtgcgttcatcctcatgatatttcctagatgggaacatattatccccatcatagaaatctgtgaactgagccacatcagggttcaatagcttgcctgaggtcacacacagccaatcaagggtgcaaccgcataagaacccaggtggcctggccccagacccatgctctgcaccactacatagccacccacccacctcctccttctgccatgtttggcacagacttggccttggccaagtctctgagagaggtgaccactgggcatgccattagccagagttttccatgttatcgtaaattaagtttaaaatggaattctctttgtttacctagactttttttttttttaaagagacaaggttgtgctttctcacccaggctggagtgcagtggtgtgaacgggctcactgtagccttaaactcctgggctcaagggatcctcccacctcaatctcctgagtagcttggactacaggtgtccaccaccatgcctggctaatgtttaaattttttgtagagatgaggtcttgctgtgttgcctaggctaatctcgagcccctgggctcgagtgatcttcctgccttgcctcccaaagcattggaattataggcatgagccaccacactcggccccagaccctttttaagtaatcaatattctgtgtacaggcttgaaagactgacatttccaaaaagatatatttattagaggaaattgtgtaccaactttaagcaagagaatatgtatgctttaatcatttgagaaaaatgaactattgcttgaaaagaaaagagctaaatatgttgaacttttcccagtccagctgaaactgcccttcagagtttactgtggggtggggatgggggttgtgattgtccttttcaggttgaactttttgtattattgtacatcttatgttacaaatccttctacaagctgcacttagctcatattactctcagacattgaataattggtttaatgtgagactactttctgggaatgattcattggtatttatttgacatgttttagtgataatattgaatatatccactggaaaaatccaagaggaacctttaaatgaaatcatttccatggcagagttgggggcaagagagggagttggagttgatttctcatcgtgtgaatcccactccatcagcacgtggaaactgaggaagagggaaggagtggagaagaaccagacgagagacacggttccagatgctttcccaagtggctgtgccctcctcctatttgcggaggaatggctttggtctgcacctgcagctctggacggactgcctggggctggggctgtggaggcggacgactggggagtctgatggggaggtgggtggcgggggtgttgacaggaaaaatccgactggcggccttggagcagttcgaagagagggcgtgtcctttgcctgttggaattccaaccctggcgactttcagctacaccctcctccctcccctagccccacacaaaacaaaaatgcctcagagcttcagtgtaactggagcaataccagctgattctaacagtgtggcccagcagcgcctgctggctgggagcagggacagaaaatgcctgaggctccgaggtgggagcccaggctgggattcaggatttcgctgctccccgttcaaggcctctggagaatgttccaaagggaggtgtggatgtttcattcagtactttggagggagaaagaaatgggttctttctctgtattctctaagatagatttgttcttaatcttgaaaaatcatttctagccattttagaaaaaaaaaaacattagtacagtattagtaaatatggatgggataaaattttttttacatacacataggattcaatacatttttcatatgctgaccttataagtcatattgttttgaaattatatttattaaaaatgtgattagagttatattcattcatgtttgattctcttttaagaattattctctattagtacttttcttacatgattcaacttggacttattagagaaataaactctggcacactttctccagtcatattcgttgagcctgtatttataaaattggcatttattggacctctgctgtggatactatttacttcttttgaaatttgtaaaagaagaaaaaaagttgagcttttgtgatgacacacaaattcaaactaaatttgatgcttccaaagtatatggcagagacggatgcaactattcgttaccagaacagtggcgtcaggaagccccgtgcagtgggtaggggacacctggtgctgcctccacaccctgcccctgccagcccctgttgtcctgagcttccgcagctcccgcctgacgtttggctcagagtcgtccacactgctcgtgtccctcggctgtggagcagggccacagtctccctgcagggttgtttggagttagctgagccagcgtgtggaaagcataggtacttgacagaccaccagtgcctccatggagcaccaccattgttaactgcaggcttctctagccatttagaatacatatgaagactcagaaaaaccagttttacttttaggaaattacatattcatggcttgagctatagccactgactttgtgcttggaacaaaatacataattctttttggttcaaaagattagattcaaattattggtcatcagaaactgaagtttcctaaggcatatcacacgtaattcaaggttgctttgatgtgttattctgctaatccacaaccatggaagttcctggttagtgcaatgtttcatgctctgacagctatctttaagatgttgtttttgggttgccaggtgttcatttaaacacactggccatgtgtttgcacacgcacatgtgcatacacatagccactgcggagcgccaggagctgtaactgaacgtggacttgatagagcagtatgcgatgtttttgtcttcagggcaagctcttgatgcatagcttcatgtgacatctcgtttataacagcctgaggcatcagtaatctttatagcaagaattctagtgctgtgttatgcataccaagcttaccgtttattctgcccagtaaatacatggcttttatggagtcataaatcatgacagtaggagtcatacctctccaaaaaagaagagatttaaatctttagagttaacaagatttaatgtaatttagacattattcttacttagaagtaccattcttatttaaaggcagtatatctcatatctttaaagataactttagaaacttactgccagagaaacaaatattgattaagagcacactgtgtgccaagcattatgcgaggtgctggagagaaggaaggggaagaaaaggtcctcaccctcaagtaacttgaagcttagagggacaatgataaatagtaaaagattctagagtccgggcatggtggttcacacctgtaatcccaacactttgggaggctgaggtgggcggatcacctgaggtcaggagttcaagaccagcctggctaacatggtgaaaccctgtctctactaaaaatacaaaaagtagccgggcgtggtggcgcatgcctgtaatcccagctactcgggaggctgaggcgggagaatcacctgaactcgggaggcagaggttgcagtgagccgagatagcatcactgcactccagcctgggcagagcaagactccgtgtcaaacaaacaaacaaaaaagattctagagcagtctgatcagggtgagggttccgtactcttcttgtgccatgaagcaggaggaaaggcctcctgagggagctgaggctgcacgaggatgagcaaggtttcataatgtcctccagaggccagtttaccaagctgcatcagctcctccctcccagccaccctgcccttcataaagctctagttttgtaggggatggggtgggatggggtcacacctcagctgccggcatgagctaagggaccatataacagtcagcactgtccatcgcttgcttctctctctttctaatttacatacagctaaacacagatttttaatgaatggctgataagttttgacagatgtctgcacctgtgtaattatcaccccagtcaaggtacagagagcacctctatcccctcagaaagttttttccatgctggctgttgtgtgccagtgtgccaggagagcatggggcaggggaatgatggccctaagaaaggaaggaggaacagggggaatcttgaattacattctttccccacgtggagatagatttgtgctaattccacaacgtggaacatcctccttcgtttgcttagacttccctgggagcagtagcccatgtactggtggcctagctcaactgtggcttggttctgggcctgtaaagccatctttcccacctacagatgacattccctatcttcatcatgtgcttttagtcaggtttcctgcgggccagatgcatctgagagtgtgccctcattaatatgggactctgtgtatgtccagcacatgtggggtttattcacgtaccagtgattattattcaacatcgttccctttagtgcagcaagcactttctgagtgcttaccatgtgccactttctgtgaacctctgcagttcaacagtggagtcagaggcagtccttgttctcaagtagctcatgatctactgtgggagacagatggctagatgatagggtgtagtcatatcccattatttctgataccccaaatcttgatcagaagccttgatcagaagctaggaaggcttctgatcaagatttgtggtgtcaagaataacaacgattacagcaatagtagttgcttattgagtgtgtcctgtgtcctaggcacagttctgagtattcgtctcttacctcatttaatgatgatacctctcccatgttgcagatgaggagactgagggccagaatggttcagtagtgtacccaaggccacacagctgttaagtggcatgagaaagaaagaaactttcattttaagcctcttagatttttgtggattgtttgttactgcagcacgaaccagcccatcctcactgataagagccccagtgtgcggagtggattcctgagccagttaaaaggttgctacagcagtggaggcctggttggagggtggtgataagcctggaaataaaaggacatatgtgagagacagtaatttgataaagagtaatgaaagaggaagctttctttcaggtagcttattctgtttcattattgttgttttccttttgggaaagaagttgaattttcattgttggcttatgttttcaagggtgacctcagtattttattttattttatttttttgagacggagtcttgctctgtcgccaggttggaatgcagtggcgtgatttcggctcactgcaacctccacctcccaggttcaggcgattccccagcctcagcctcccaagtagctgggactttaatgtttttatattggtgattttgagcagagactgtattaccatctaaaacactacaagcctagcatgtaagctccatgtctgtttgctcctcattctctccagggcccctggcacagttccgggcccacagtgagtgctctgtaaacttttagggatgaacaaatgaatatttttaaatctgttcattgttttcacagttaaacttttctaagcacttatgtaatactgtgtttacttaattttcatttctcaccaacctttatggaagactaggtgataactggttaaattgtaatacagtatcataggtataatctcgaaaaggtaaaaatcaaatgtaacgaagcattataatccagtgactggaacattttatgcaagcctttgctctttatttatctatttttttatcatacacttcttcccagtttttgcttagtccttgttagcagttacattaaaatctgttttaagttccacctcagggaatatcaaaagttggttacttttctaaatgggcctttaattaaaattttaaaaaattagaccattgtgttagattttttaaaatgttggctaaaacagaaaaggttgatttcagtgcagttgggctgaaactatacttaaatagattaaagtataatctggcttttaaaaaaaacacatctgactgggatgaagtagttgtggtcttaactgaagcaggtgaatggaccatattcgcctttaagagccttctgactcccaggttttctgatttttaaaaacttcctatttagtcatatgtttttacttcactttatggtttaagtgagccaaccaacaaaagttactcataaaagatagtattttacttgtaacaattgcagaaaaagtgaaaagcttgacattacaggtagaaaggaagtcagtctctgtcccctgtgcgtttccgagactgtgtttctatttatttgccctttgtctgtttcccctgaccagcgtgcgtttctttctggaggcgcagggacctcggcttatttttctctgtctttgcattgcttgacagagggcctgacccagggtaggcactcccgcttcatgactacatctcattttttatttatctttgttatgatagatagcagataaagcagttgatttcagtcagaagcagaccacagcagcaggattctttccacggtgcatgttctggctgagtgttggtgggctccaccctagccgaacctgtgtctgcacacctgttgtgtcttcctgggaggctcccaggcatgctcctgtctggccagggtgcttcctcctcgctctccagctggctgaagggaagctgggcaagagtgtatgtgtttaggccacagggagagcacagactcccagagcatgaaccaaggggcttccaggcctcagggactgcctcctggtcccccagaggccacctcactcttactcctgtctccaggctggtgacctcacatggccccagccatctctccacatcctcccctccctgctgtggagcccccactgacagatgccttccccctgtgttttggctccaaattccaagtgagagtaattgcgtggcttcccttgggtctgtctccatccctgttgtagtccctcacagcccagactgtggactgcagaggcatcacctaggggcttgtctgagatgcagagtctcaggctctaccccagcatccggaatcagaccatcctcaggggattggaatgcacagaagcatttaagaagcgctttgtaaagccatggcctctcctgcgcaaagaactgcgtggtcccttttcctggagtaggaggctgtggctacagcattttcatctggaaggaggcctaggaaatgatgtttctgtggccttcctaccccctctccctcaccctggtgactctcagttggggagggctgccgggcagtgttctgggggcagggaggtggtgggagaatctggagagctggagagagtgaggtggtgaggtgggcctggcgtgttcaaggcagagaaggaaggaacgagggaactggctggagagacttggagggctcctcagagatgaggctgagtgggagtgaaggtttcgtcaaggttacgaaaggcctttgagttcaagctgaggcctttggacttggcccctcgctcgctttgccaggagacaggcggctccttgcctgagcctctgtgcttgcgctcctctccccagccccaggtctgcagagtgtgtggctgctgcaccctcaggtgtttgctcatctcctcacaggtctttcctgccccctacctgttaaaagtcggaccccaccacgccccccacctctctgtccctgctctttgggcccttccttttccccaggttgggctcttgcctttttctctgttccttcactgccacaggtcagactgtcttcatatgcatgcatttacaggcacatttgtggttggttttgtctgctctgctcttcgcaaccctagaatgtaagtacaaggaggataggcagggaccatttgtctcttcaccattctggtgctgggaacagcatagcatggtggtggagtgggctcactgagtgagctggtgagcatgggctgtcttgaggtgccggctgtgttaggctcttacccccacctcccccagtgtcttccaggcccccttcttatctaaggctgctacgtgttattggagaaaattataatacctgacttgtgagttccattccagaattcggccagccagtttctccccggcctctccggcagcctctctgcttctccctgatcctgcagcgtgtgcttgaaatccttcctcacggtgcacactcatcttcaatactgcagcatctgaccctgacttcatacgcttgcttgctaagtccacattctctgcaggaatcatcttctccctcccccatcgcaggggagttccctctctgcagggttagatccaccgctaccccccagcccccacccccactcccactcaggcaagccttgttgccccaggcccagacctctcagattccctcctgtcacactgccttcctgctcagcattaccagggctcctggtaagtttccgtggaagggtttcccttagcaaggcttctgttctataaaatgtttacaactcccctcccttccccatgagtttgagtctcaactctcaaaagacatctcccttgcgtctggctaatccgggtttgtttggcctcatcctttcagacttcagaatccaactcgctcttcatgagcctttgtcttttaccagtggtagtttcgttgactttttaccccatcatcctttgtgggtagattgaagctaagatagagttttctcttttttggtatcaaacccttgcatgctttggtgaagtggagcaaagcaaaatttgaacacccaaagaatttattcagaacggtgtaaaatgagactctctggatggaacaaataacaacattcgtaaaccacgtgtatatttagtaagctgcggagttattggaaattcacaggcgcttctgctccacacacattctgttgaattctcagcatcagacagctaggatgtcagtgctgtctgctagtgtccttgtgactgtggggacatttgtctgttttaaattgttgtgaggtttttattctgaaccttttcacatcttcagtatatgctcttcatttttcaatcagttaattcccaacagtcattgtcaccagtaatcttatattttacagtttaaaggattatatgataaactttccattttataaatggtaaaaatccctttcaggatttctggtgaagcacgtttgaagaaacatactggttggaaagcagcgtgaagtatgcccctgtggaaacactaccgggagccaaggagattgccctctcatcgcggggccagtcctagaagccacttcttccccaaggcaatggcaggaggaaagatttgacttagtgtggggatgataaagatcaggaggttgcagcacatcatcataggaagatacagagaggctgtgaggagcaagacaagtctgaaagccaccaagagggagacagtactagggagacttggcagggtttgtagtaaagcgaaactttgccagtcattagaaattagtttagaggcattaaaatgctgcccaaatcttggaagataaacttgtgctctggtgaattattcctctctctctccctaattcctaattgcaagaagttgctctagaatcagctgggactgaggggttgattgtggtggatttgctcccctcctccacctgcaccttggcattacctaagttcccccttattgggtgctcatatctttagtgcaaatattttaaaagcccctccatgtcataaatcactcctcaaatataaagtacttcctgaaaattgcaaatcttactcttgctgttcaaaatattggttgttctcatgaagaccctactgagatggaagcagcctacctgaaaattgtccctattcgtaccatgtgcttaggtaaaaagactcaatttcattcagatggcatttctccttacattaatttacaaatttaatatgatcccagtaataccctcaggttttttttgagctagattgattctaaatttatttagataaataaatgagcagtaatagccaggaaattccctgaaaaagaaaaataacagctagttctaccagatactaaaaatgttatacagcttccactgttcaaaacaacctggcattggcacgtgaaggggctgacaggctaatggggcacagtagaaaaatgcagaaatagattcaaatgtttttggaaatgtagtgtatgataaagctggcatctcagatcactgggaggaaaagaaggaatatttaataaaaagtatggggacaaggatatccgctacctttagatcaggggttccccaatccctggtccgtggactggtactggtccatggcctgttaggaaccaggccacacagctgagctctgcctctagtcaggtcagaggtggcattagagtctcacaggagcgtgaatactgttgtgaactgtgcatgcgagggatctaggttgcaagctgtctatgagaatctaatgcctaatgatctgaggtggaacagtttcatcctgaagtcttccccgcaacccctcttcccccgagtctgtggaaaaattgccttccatgaaatcagtccctggtgccaaaatggttgggaactcctcctttagataaaactggatacatcccttataacatagacatcagtttgaataaactgtaaatggcacaggtgtaaatgtaacagcacctgaacccatgcaagtattaggagaaaacatgaatgagttccgttatataacctccgagtctggaagcaataagagaaaaggttgataaatttaagtacatttttaaaaagttggatgacaagaagcaaataagcacataaaatgataaagaaaaaatagtggaaaagatttgcaacttaaatcacaaacagaaagcctaatatccataatacaaagagtttccaaaaataaaggaaaaaaccaatagccctacagaaaaatggataaaagatatgaatagacagtttacagaaaaacgcaaaggtgaaacagtgctcaactttgctcataaaaagaaaaatgcacattaaactactcactgagataccatttttcacctgtgtgatatcaaatgtagttggcaagaccatagggcaacaaatattctcttgctgtggtggaaatgcaaaatggagccgtcttcgtagataggaatttggtagttctggtaaaattcatatgcatttgctttttgactcagcagtcttgcttttaggactctatactagaaactagttcaagaccattaattgcaacattatttcttattccaaggagttagaaacaaaccaggtgtccatcaggaggggatttctggtatgtccatgtaatgaaatacaatgcattgtaaaaatgaatgaagtagacctgtatatattctgcagagtgatctgagtgatgtattattatgtggaaatagcaatcgcaaaacatttttatagtatactatatcttttatgtaatacagagggagaaatatgaatatatgtacatattcatatatttatatacacatatgtatataaatatacatacacacacacacacacaccacacattttttctatataatttaaaaaagaaaccatggaagaataaactaaaaactcattttaaacatggttagctttaagaggagaggccagggtggaatagacagggatagaaactaaaattctttgagtgtgcctgttttatagaattactttgaaatcaggtatatgttttacttaattaaaaattaaaaaggaaatacaaatacaatctcttgaaagaaagaaaaaaaagggagagggttggaggaaggaagaaggagaaaaggaaggaaggaatctatgtatatctcacagagaggatatttgaactgattttaaaacatcgtattttgacaatgtaattctagtggggtatagcctaggaacagaagagccacagagaaattataaactgcattctgttagtagcaacgttggtattgttactctgaaatacttacactgtgtgtatgtgtacacactgttttatatgtgtgtgctacatactttattttagaatagagaaaactgattatgttaaagctgttagacagcaagaatttcagcataatagagatacaaagataaaagcaaagaggtgaagtttaaaacccttaaagtttgagttggaaatagcagtatgaaatcatggttagtatttttctttccagaaagtgcctatttcctacccttattcactgaaaagaactaaaatcgttgagccctggtatcatccaaattgtgctttcttaataccatttttctctataaggaaccagggctccttggagatatggctggttttaggtggggcaggaaatggggaaggtggacctcggacatatagatgtacaagaaagttgccaaagtccccctgcagctatgtcacaaggacacaagacccttaaagtgttgtccattgtccaaagcagggatggtttgaggatgaaaaaaaaaaatgcagtggattgaaacacatagaaaacacaactggtttgtgtaaaaaacacaaaaatcccatagttcgtaatgatgctaagaatgtatgcagtaagtataataccacgtgtgaagttttcttgctaaaacaaattaattgcaaccaaatcaaacctctagatctaactgtcagtttagagaaaatacaggcatgagagagaagggcatgttaaagaaaacgtagtcaccaaatccagagggcattaaaaagaatttacaagacaaacagccagcttgctcagtgacagatggcttgaaaggagtggggaggaacatacctttacagattaaaactatttaggaggcacagcaagcagatgctctgtgttgactttgttggagtgctgatttgaacaaaccagttgtaaaggacatttttgagatgttcatggagagatgtccatggatatttgaacgtggactggctcttaggtaatattaagaaattgtaattaatctttctaggcaaaacaatggcaatctggttatttttgttaaggtgctgtctgttagaaataccaaggtattagctggtgaaatgagttgctgagatttattttaaatactcttggtgggaaaaagtgtgggaagaagacagatgaaacaagttgacaacatggtggtttctgaagccgaatgttgggtgtgtgagtatgtattatacctccctctctctgtactttgtggtgtgtttggaaattttcatttaaaaaaatggttaaaaatttttaaagagttgttattgttgttgacccgaggttgagagctcttggtgggtaggggactcatcatggaatctgaaaggcagctttatcaaaagagtaacgtgtgcagatgggcgccgttcatcccctctcccccatacagacacatttttgttgttatattcatagacacaacagacatttctacaggatctgcttggtacagggcactgtgctaggtagatgggagaatcaagcatgaaatgggtagaatcctgcccgatgagggcacagaaggcccccaatgccacagtatagggggaatggagatggcttggaaaagaggtcaccgtggagttgggccttgaggaatggtgggtagcagttatgtggcgatgaagagactatttcaaaggaatgaattacaccagcagaggtacagaggaagaaaggtaaagggtcagtataggtttggctgaagctagagagaatctcaaatagacttggtcaagaaaagaagaccaaggccgattccctaggaccttgaagccagccttgggcatcttcctggccaggagccaggcctcttttctcttgccttctcgagtagcctgacaagatgtctgccaggtgctcagaaaatatctgatgaatgaatttactctgtatgcagtagagtgtgatctgaacaaaaactcttaagagtgtcaggaagttaaaaaatataaaaaattttctgatgaaatgtaagttataaacatgttggttgaataaaaattaaatgttaccacaagtattttgtcactctataaatacagttctaaataaaggttctcagatgcagtttcacagagcaggctgtggcccagatggcaagactaagagctgaagaagggcggcttagggtttctagaccagtaatggctactgtttcttgagaaatgattatgtgtcaagctctgtgctttctgtatgccatttacctaggagaggtgttactcctgtcttacacatgaggacatgaggaaccaaagtcaaaagtaatttgcccaaacaatttacagcaaatatgattgaaacccatatctatttaaatcccatcttaagcagagtttttaaaaatgtgggttgcatcccaataacgagatacgaaatgaattctttggtcatagtgagaatttttttaaaatgagacaggatgaggacacattgtaataagtactgtcgctggttgggacaggtgatgtgaaaaagaggggggtatgtgatgaatatacacactaatgggacacacacgtgtgtttctgtgtctgtgaatgtgtgttgcaacattaggttgcaatgcatatgtgtttcttacgatcagataaattcaaagaaagtttaacattgcagagggggctctgaatgagctggatgataggcagacctggactctggagtcctcccagaatggaccagacctgagggcttcacagagagccacgtccacatatgcgagagccactgatggttctcggcctgtctgaggcaacaaacttgtaagcatgatagctcactgcagctgggctcagcccaggatctgaagagggcttctcaaagaaaggggagctaagggcaggatccagccacgtcacattctccatgccttgctgggaccctttagccagtgaattgtttcatttggtcccatggcctgggaatacccccaaattccctccctgatccctgagtagcttttcaggaagtgctcacttggagagagaggacagagccacagagccttctcagagagaagaacccagatccatcctgggagcactcgaggccagcccttttggctctctgcggctgccttcttccctccaatgcaaaatggtacagccactacaccctggcagcttcctataaaattaaacatactgtcacaaaaccctgcagtcgcattcctaagtatttaccctggaaaagtgaaaagaggttcacacaaaaacctctacacacaaatgttcacagaagctttatttatggtagccaaaagctgaaaacaacccaaatgttctttaatggttaaatgcataaacaatggtacatccatacaatggaatacaactctgcacatcctcgtcagctcttggtattgtcagtatttttaatttaaccattctaataagtgtgtagtggtatctcattttgttgtagtttttattgccctaataatggctaatgatgttggacgttttttcatatgtttaatttgccatgcttgagtcttttttttttttttttttcttgagatggagtcttgctctgttgcccaggctggagtgcaatgatgtgatcttggctcactacaacctctgcctcccgggttgaagtgattttcctgcctcagcctcccgagtagctgggattacaggcacgcaccaccacacccagcaaagttttgtatttttagtagagacaagatttcaccatgttggcccggctggtctcgaactcctgacctcaagtgatccacccacctcgagctcccaaagtgttgggattacaggggtgagccactgtgcccggcctgagtctttggtgacgtatctgttccagtcttttccttattttgaaattgggttgttttctttctgtcttaatttttatttttttaaaagagaaggggcctctgctgtgttgtccagactgacctcaaattccttgggctcaagccatcctcctgctttggcctcctgaggagctgagcctacaggtgcttgccactgtgcccagctggattgttttgttattgtagaattttgagcattctttgtgtattctggtcacaagttctttgtcagagatgtgatccacagtattttctttagtcagtagcccacattttcattctcttagcagtgtgtttggcagagcaagagttaaaatttttgaagttcactttatcaatttttttcttttatgaatcatactttttgtgtcatttcaagaactctgtccctaattcagaatcacaagaattttctcatagtttttcttcctaaaattttgtagttttatgttttgtgtttagatctaggatccatttgagttagtctctctataaggtgtgagggttaggtcaaggttcattgttttgcaaatggatgatgaattattctagcagcatttgttaaaaagactatccttttttgttcattgaattgcttttgcacctttgtcaaagatcaaatggcccaatttgtgtgggtctgtttccagatatgctattttgttcgtcgatatttgtgcctgtctcttcaccattacaacattgtctttattactgtcaatttacagtaaatcttaaaattgggtagtgtgattcatccaactttattttagtgatttaatcttctttacccttccatgtaaattttagaatagctttttcataactctacaaaactctgctgtgattgtgattggaattgcgttaaatatacagctctctttggggggaatcaatgtcttactgtgttgagtcttccaatccgtgaaccaggaatgtctttctatttagatcttctctgatgtctttcatcagtgttttctcattttcagcatgtagatcctgtgtatgctttgttagatttatttttagcacagtggttgcttggtacccatggggtattcattccaggacccctgtggctaccaaaaatagatgttgaagtccctgatacaaaatggtatggtatttgcatatcacctatgtacatcctcccgtatacttcaaaccatctgtagacttcttataatacctaatacatgtaaatgctgtgtgcatagttgctatactgtatttttaaagtctttttcccccaagatatttttgatctgcagttgaattagtctgacgctgtggaacccagagacacaagggctgactgtgtataacatgtggtgggggagctactgtacatgttactttttaaaaatagccagttcctggttgttcgtctcgcatgtggaaatatggttaacttttgcattgaccttgtgtcgtatgggcttgctcaactcattcattctaggagatttgaaaaatagattctctgggattctctacataaacaatcatatcctgtgaataaggatgaagttttatttcttcttttccaatttgtatgccttttattgccattttatgtctcattgagtcacaagccttatttgatcatgctgtgatgtccctgcctgccttcttctctgtgggggttaaatgggaacagaacctactttttactgaatgaagaattatttatttatttatttatttatttatttgagataggtgtctcgctctgtcacccaggctggagtgcagtggtgcaatctcggctcactgcaacctccacctcccaggttcaagcgattctcctgcctcagcctcctgagtaactgggattacaggctgcaccatcatgcctggctaatttttgtatttttagtagagatggggtttcaccatgctggccaggctggtctcgaactcctgacctctggtgatctacccacctcggcctcccaaaatgctgggattacaggtgtgagccactgcacctggcctgaatgaagaattattaaacctgaagaaacagtaaaaaataatcacaagaaaaacaaaaccacagaaagaaaaaagaaatgaactgatgtttgtttgtttgtttgttttaaaagactcaaccattggaagaacaagagaaggatgggtttatccacaggtgtatttctatgtaatgatttcccattagtgggatactatgtagatttctcattgcagtcctgtctgggtagagagaatggcctgtagaaacaaattgtaagaaacatgaagccatcaaaacagcccctcttcaggtcttgcagacagaaagaaccatttgatgccatgtgcttcagccagcaccatttcagcatgtgcatgtgtgcgctggcactctgggaagtactgtgacagcctgctaatgtctgggggtggccctgccttagtaggcatggtggggcacctgcctcctacttggcatttctgctgggggagtttttggcctccataactctgtgactgttgaccatggccatctgtccagtagagtgagagcaggagctgcacctgtctggaatggcagcctgtccctaccagtccctgcatcgctattttggagtgagacagataatgcagacacagtgtgcgagcaagcagtcctgtgggagagctccaggtctcctgttccttatgttggaaatgaagtctgccttacaggcagaggggaactactactttgatgtaagaggagatcgctattaggaaattccagatgtccacctgacacctccctgcctctccagtcctgaccagtgttgtacagcaaaggatcccaactctaggaaatcttccatgtcaggttcctgaaaaagagaaaggatgtttaatgttttttacaaaataaaggcaggggggctggacgcggtggctcacgcttataatcctagcactttgggaggctgaggtgagcggatcacttgaggccaggagtttgagaccagcctgaccaccatggtgaaaccctgtctctactaaaaatacaaaaattagctgagtgtggtggcacgcgcctgtaatcccagttactggggaggctgaggcaggagaatcacttaaacctgggaggtggaggtggcaggctgcagtgagccaagatcacgccagtgcacgccagcctgggtgacagagtgagactctgtctcaaaacaaacaaataaataaataaaggcaggggtcggagaaacactaaagttttttgtttgtttgttttgccttttccccatccctttttctggtagtttgtaaaactttagtgttgtattaccagaagcacttatccactctgcagattttaggactccaccatttctagaggtgggaattttggtctggggccttctttgagaaacactggccctcagtccttaccactcctagagaaggaggggatggcagtgggcaggggacagatgtgtgcacatggaggactgggagggctggacataacaggaggctactggtcctgggcatggggctgtgtccctgtccctgtgttcacatctggacctcaacatagggcctgttagctgaggtgcaccctctcttaagtggcttcatggagattttgtaagaaattgagacaagttggaaaacacaaacattgtgagggtttgtagaacgggtgggtgcttgctgaaagtttatattcattccatatttagttgtctttattctgttcaaacattttcttgtttacttgttgaagcaggttcagaaatagttattctgtagtgtctcagttttattaaaatgcagttaatattggaaaatatggttagaattaggtgactgccaaacatggctttcgtcagtgttagcctgtgtaatgacactgtttttctccttcgtgtgactatttataataaaaatgtgacttgcagtattgttattgagagagatttagtgaaaaacagcggttgagtagtttccatgcttcaagttttacttcctcattagtgcctcatgtcatgacctgggtctccgatttatttagcacggtagcaccaataataaatattctacagcctctaacctgatagatcattccgcccctcacagccagccgggaggtaacattaacatccgtttgctggtgtttgaaacctggagctcccggagattaagtggagccaccatgggcaccgacatctgtggccactccacagcccattggttccgtccttgacccacacttgacctgtctgctggagggggacccaattcagggaacccagggctgtgcatcaccacccttgagcatgtcctgttacctttctgaactttagttttcatgtcctcgaaatcaagatggtgatatactctgtaagcctacggttaaccagaggtagtagtttgcagaataaaaaaacacccgttgtgtaaaggcttcagtgattgtttccatttctttctgtctaaaacttaatgtggaccatggtttaccttaatcataaaccacccacttgttgctttgttaataacaaccaatcttttgatagcactttccattctataaagcactttcataagcatgtcactgaagaaggtgtttaaaacgaagatgatcatgtctgcaggtgtgatgcgtgacatggatattttgtctgaccacctttcattttttaccccttaaaattttcccctctcaggaaagttcacacacccacagccatatgaagtttttcatataatttgcactccctgatacctttttttttttttaatgtcaaagttggaaccctgctttaaggcaattaaactgatatggaagagaagtttctacttgaaggccaagcagcctggtttggaagcctgcatggctcagctgcccactagttgtgtgatctggggcaagagtaattgagccctagctttctcaatagagaaaatgaaaatcatgcattatgtcttgctgcattgctataaacacaaacgataatatatgtaaagtatatcacgtgatgcttggtatatgaatatcacccaaaatactaactgctgctgccagtttttttaagcattggtattctaattaaattatgtttttgccagtgattctgagacaagagtttttaaaagtttcttcatggaaggatctgtaccgttttcagctttttattcctatgcatcatttttgcacataatttctcaataaatgtatcaagttgaactttttgaggcaaataatatttatgtcatttgaatagtggacaacgatgaacttgaatgactttatgtatgcatgagcattaattttaaataaaccagaaagctacttttatatttcgaaaaataattcatttgggttttcctgttcaaactttgccatgttactcctaagtgataccttacttactgagatggatcagccttagggagaggtttgtcatactttgttacacactgaatagcctataattatcaagattatatccagttagcataaagtgctgtttagtttctgttatgtcgttgttaccatagctggagtcgggtgggtgtttaaacctttgtgaactcaaaattctttaatgatgatggaatatttcatgttttagtattctcttgatctagagtatatgttcaaatgttttaccaggtatgtgttttttacaggttcatataatatataaaatgcatttctgttccaagaaaaatacaagtggtaaacagttgggagagagcttgcatattttcctttattgtcctgtctgatgattaatgcattcagctatgttcagcctcacgtttaaccaggttagtgtttagtttggttaggctgttttccttatgagaacagaaatggccaatcctgtgccctgcctgtcttccagatggagtctttgcattgtttccagatcacagtgcttaatgtaaggtcagattttcttgtgaaaacagattttggattaactatgtctgtgcacttgcacgcacccctccgcacctgcctgttcacttaagctctagctgcctgctggagtcatggttctgatttcaagatgcaaatgagaattgagattctgctttatagcctaaaaatgcaaaagcaaattcctactgcatgaatggtctgcaagtctccctttcatagagaccatgaggtgtagtggaaagagcttgattcttatgaggatttaatgtaggggtgagcagactatgctgtgggcctctatttgtaaataaagttttattgggacatagttgtgttcatttctttaatattgcctatggccattctcacactacaacaacacagttgagtagttgcagtggagaccgtatggtttgcagagtcttaactatttattttctagccctttacagaaaaagtttgctggcccctgacttaatgcaataaaaaactcagtagtttgaatcccagctgtgttatgcaatagctgtatgacattgatcatgttctgtaacctctttgtaccttaatttttcccctattaatgtcatttatccatttactcagtgagtatatattatgaacttactatgtgccaggccctgctccaagctcaggaaatacagcagtgaacgaatactggcctttatggagcttgcgtctcagtgaaacttatcttcatgaggataattgtacatgcctcctagggaggatgagatgaattaatatatgatacctgtaaagcataagtagagtacatgctcagtgtgttcgttattatgctaactatagggttgttaatgtgtaaaacaaagtagaacctctgttcagagttggaacccttataagtccgcgtttactattcttgaggtttttactgaaataacgaatgattagaagtaattgggcatatatctggtacaattagcctaaaaaagagagagaggagcttgtatgaaattaggattctccattaagtgaataaaatcgtgtcactgagttcccagctaagagcagtctgagattgacaagattgttcttggtacacaggatggctcacatggaaaagatgagaatgggaaaagtaaacatttgattaatatatgaaattaatactagtttctttgtatacattcaattttgataattaattaatttgatatttgtacaaaaaggtcctaggatgtgagcactctccatcttggcactcaggcatgtctggtgagtggaatggatacagagtatcagaggatctagaagctcctgattatatgagttggggaaaataattttgctgtgttcctcgtttgtaaagtaaggagactggactgagtttttccaggctcttttcagctcttgagtatgagatttatgaattttctctgtgaccagattccccaaaataaagctttgcatcgttcttctctcctgcaagaagccaccacttcttccctttcataatgaagcaacacctctatttcttcatgtttctaagtacagaatgcataatattggagtaacaggaccctactcatctcgagaaattatcaatttcttcaacttcttaatgaggataattttctttcttgggcctcgtatgtaagtggaagtatgatttttgttggaccacatagtcactgaaggcactttccagttctggcattctgagactccagaatataattcagaagactataattcagaagactaaagacggactggaaggaagagggttatgttgggcttttgttgttgttgttgttcttttaaggagagaaacttcacagctgggagcgagactagacttgctgttggggtgagtggccgtcttgcagtacgcaaccactggtagtgatttcaggcctcagtaggcatctttgtcatttttatgtggtgtttatgtagtatcctttttcctctaatgctcttcctttggtacataaccttgtaggaaaagtttagatctgaaagcacagatgctgtgaaaggaccaattctatattgccttgcatggttacagacaagaaagcgaagacttgaaatctgtagtttgtggtttgtgatctagcagagatgaaatagaattcgtacatactttttgagagtacaaagaaaaagaatcattcgtactttatttggaaacatgccattcttctggggctttcatttttaaaatatttaggaattaataatgtgtttctgaaaaaaaaatctctgattgataaagaagtggaaaagtatactccaatgattttaccaatcaggagtccttgcccttaaacatttgaagttaatgtttttaatatctaagtattctacattcgtgaaattccaaataaaaacgcttatacaaacaaaaaggcagactgcatcatctttttttttttttttgagacggagtctcgttgtgtcacccaggctggagtgcagtggcacgatcttggttcactgcaacctccacctcccaggttcaagcgattaccctgcttcagcctcctgagtagctgggattacaggcgtgtgccaccacgcccagctaatttttgtatttttagtagagatagggtttcaccatggtggccaggctggtcttgaactcctgacctcaaatgatccacccgcttcagcctcccaaattgctgggattacaggcatgagccactgtgcccgtcggactgtttgctctcatgagagcagggtgtgaaagcccccttgttgcctgtttcagaatttatgcagtgtggtgggaggaggtctggctctggagtcaggcagacctaggttcaaccctggccctgctgtggagtggatgtgaacctgtgccagcctgtttccccctctgtagaatgggataacaggaagtcctgcctcagaggctcatagggaggattaggtcagatactacatgtaacgtgaacagtgctggccaatgcttagtacatattaactgcctttatttttgtttgcacaaatatatcctaatcttctgaaatttaaacctggatcagtgacttgtgtcttcatttgctaatggaagtcctttggcaccttaaaaacaatacgttggcaattggacttgggattctggattaaggtggtgcagatgcacttcccggtatctctccagctaaatacatccagaaccctgtcatcatatatgaaacaatcatggaaacacgtgacaggtggggagaagacggcatactagcaaggggccttgagactcagaaacgataaggtggcaagttccctgggttttctcagactgattaatgttagagaagctgtcaacccagaaacaccaatgggtgcagaccagaaagccctgaggaaagctcactctttctccctaaaggaccaagaaggggacaacttaagacagaaaacttttagacagtaagtgccctatttcagccaaacaccacggaaaagaatgtggccccagcccaccaacaatggctgaatggggagccgaaacagaaaccttcccctggttataatgaggcacccctcacccctgctaggtggtgtcagagaagatggagctgggagccaggtttttatccccactgggcagtaatgaggcatcccccaacccctgcccagctgtactgtcagcagagaccgagtagggagcatgaacaaccagctctgcccagcagtagtgaggcacccctctctccccgggtgtcaaaggaggttgagtgagggacctagatcttcaccacaacctggcagtagtgagctgctctgccttccacgtgctgttgttgaacgagctctgctaaaataggagacttaaacttaagattcagtcttctcataccactacacccaaatgtttagagtacaatttaaaatcatgggttacactaaggaccaggaaaatcttagcttaagtgagcaaaggcagtcaacagatgccaataccaagatgatgacatggatgttggaataatctgatgaggatttcaaagcatccatcatagaaatgcttctgtaagcaattatgaccacactggaaacaaatgaaaaaatctcagcaaagaaatggaagatacaaagaaaagccacgtggaaattttaggactaaaaaaacagcaacctgaaataaaaagccaaaactcagtgattgggttcagtggcagaatggagatgctggaagaaaaaaatcagtgaactggaggatggaataaaaattatccagtctgaacaacagaaagaaaatagactgtacaaaaaagttaaccaagcttcagggatatgtgggactttaataaaaggccgaaaaagtattcaaaagaataatttcctcaatttggcaaaaaccataaacctacaaattcaagagggtcaagagtggatcgagtttccttggtatagcttttgaatagcaagtgactcaactctctggaaattttcatgatcctattaacccatcattcctgttaaaacaagaaaggatctcttctcagtcttttattcttcatgactcgggcctattggccttagtccaggatacatcaaccagcattttcaacaaaagtgatggtgtttttgctaaatatattgttttgctaaaccagctattatattggtatatatcccgtagaaatgagtgctcgtgtccaccaaaagccatgaacacaaacgttcatggcagcctaatttataatagccaaagactggaaacaacccaagtgtctatcactaatcgagtggataaatacattatggtattcattcagcggaatattacatagtggtgacagagggagcttctgggaggtgcagcagctgggcacaagagagtgcctactgtatgactccattgatccaaaatcccagaagtggccaaagtaatgtagggtgatagaggtcagaatactaacctctagtaggggttatcaactgggagaggacacaagggagtctctggtgctggaatgttctttaccactatatgagtggtggttacacatctgcctacatatataaaacttgtataagcgatacacgtaagatttgtgcactttaccgtaataaattaaatgttaaagaaatgtatacagtcatctcttcttatccatgggggatatgttccaagactcccagtagatgttgaaaccgaggatagtaccaaaccctatgtatgtgaggttttgtcctatgcatatgtacctgtgataaagtttaatttataaattaggcacagtaagagattaacaacgataactaatggtaaactagaacaattacaacaacaatagattgcttacaatttcacagacagaagattggttcatactattgatcttagcaacctcagcatacagtttttttcttaagtctagaactctgaccttttcacttaaaggaagcactttatggcttctctttggcatattcaaattggcagcatcactactcttgtactttgaggtcattgttaagtaagataagggttccatgaacacgagcactgtgataccatggcagaatggctggggagcataaatagtgtgggtgtgctggacaagggaggattcaagccctgggagggatggtgagagattttctcatgctcctcagcatggtgcacaacttaaaaaacaggaattgtttattttaggaattttccacttaatagtttcagaccacgggtaactgaaaattgcaaaacgtgaatccttgaatgagggtacaactctctgttcttttctgaagcaccagtctctgtaaattctttctgttgctttcaggacaaagttaaaactggtaagcttggccttcagggctgcccctgattggacctgcctggccggctcaggtgtcctcttctgtattcctgcagcccttcgtgtttccctccagtgctggatgtgaatggtgctttttgcttgtctgtggggccttctctctcccttatccccacccacatcctgacattggtaagagcagtacctgtttctgatttaccttttagtccccaatacaaggtctatcacaaagtagctttcttttaaatgtttatcaaataaataaatagaagattaaaagaggtgccaggtgttagcacacagagaaataggtcttggaaaaaggacctgaaagtgctgttgtcatgtttgtgtcatgctgatggcacgattcccgagggcaccgaggaaatggtcagacttctttcctgtaggtcaaggctggtgagagtttggcacttgagatgtcttcctaggtctgctgaggctggcggcccactacccgcatttgtccctgactgctttgcaggccgtcccctgtcctacagcaggccaggtctgtgtcactggccctccctctccccttcttaatcctcatcactcttcatttgcacactttgaggttttccagcacatttaatattatttcagccattctctcttttctgaaaaccagaaatagttacctgcaatttgtgtggtacaatttttaaaaaaaaatgtacatttttaaattaggcagatctgggctttgccactcattaagctccatgactgtgaacaaattaacccttacagatttcattttctttatctgtcatcttggaacattattttctaccttgcaaaaccattaggaataccaaatatttgcatggaagagatttgtaatatagtaggatacttggcacgtttcctttccctcgcctatttcccattttcaagcagagctaacacagcttctaagacatatgatcttgattcgtaagacatagtcccctaattgtaatctgcaccccgagtgtcacattgcacagtctgcctcaggtaacagtggggcttccacatgtcttgccttggaggtctgtgctaggctgtcaggaggtgtggatggcaggcacgggagaagggacaggaggctggcttcctgtgggctcgcctgtcgaccccctccctgtgcccagaggacacacagcttagagcagggcccaaattgacctcatggctattcttacacattccagatagtcattctgagggctgctgtgtggcagattcccagcacgggctggacacttgagctcccagcaagcctttatttttttattttttaaacaccgtgggcaagctgatcaacagtttccagggcattatttattgatggcaaggagcttatcataatacaacaagcaattgagattctgtccatgagttaaaaattaaagactgaatgtgttcatgacagaattctgtttgttcaggcactgaagtatgacattgtagatgatgcattatgggtggggattgcaccccaagtagcagaggcagaatgcatatttttaaaaacttgctgtatgggttatttttgttctaaatgtagctgtgcgtgttagcacagatgtgccgaaacagcttttcagagctgctttgttttctctgctgctgccatggtttacccatccctttctggtattgttgctctctcaagtcatgtcttgtggtactttcgggaggctactaaatggagtggagttttaagtaatgtgcactcaagtacattagagataaattcacttcttgattcatattttctcctgcttctgcttaaaaatggggatctttcatctagctctttaaatacttcactggccagcttttgacattttgcctaattaaactgtcttaaagaaatgacagtaatggaaaactaacactgtgcttctactttttttcttatgattcagctagtttaaagttctttataaagaatgcaacaaaaatgccctaagtagaagtacaaataaaagatgatattaaattctcgcattttattgagcactttctagaagccaggtattgtgtaagacgttctgttttcttaccgtttactagaatgacaccttctgtttgcagtagagctttttggcctgtttttcatgaggccagaatgactcacctaagttcacatggctgagcaggtggcagcgccaggcttaactcagtgctcctgggtcctgtccctgccttcttgccattacctcttgttctgtggaagtctgaggaagccgcgaggctgagagtcagagacagtcctgtgcaaaggggtctgcaccgtcctgcaggaggggtatacttggcagcctctgagccacgtcctcctggaccaaacgtgggaagatattttgcattccaaatcagttgaaaatacctttctgacatctagctctaaggtttctggttgttttggacaaagcagacaaattttgtagctatgcagtgattcaacattcattcaccaaatttttttttcatcttgtaatcagaaatatagctagcttcttaaaaatcagctaatttcattcattatttaaacaaagattttatctgctagttgaataattcatgagaaaattgcactaaattcagatgtgaatgtttgctaaagaaaagatagttgctaatttttctggaatttggtagttgaactcagagaatatttgtattaatcacattgtgttttgtacttccgggtactttaagagcctctgccattactattcttgaaaagcatctttattttgtcacaaaagcttggagaatgctactcactactttaccctattgagttttgccatagaactgtagtatcattctctctggattcctttctttttggaggtgtcatggggagcagggttagtttatgggatgcagtctctgacattctcggcctcactgtgttcccgtgtggccactgaggccccgtgcagtggtgcagtccttgtgtgcgaagctgggcgccagtgcagcccgcactttatcacccttcctgccagggcattgctccctggtcggaaggattgttggttcttccttacttaggtctcgtacccactccaagtgcaatgctgcgggcacatctcagctggtcagcaaaacttgtactattaaatgcctttatctcataaaatcttaatttataaaatgtaggcagctggaggaatgctcagccttcctttatggcaaaggaaagccccaaagaacattttttacctatcaaaaaagcaactttaaaaatctgcagcatcagtaattaaaagggaagcacggacagttctaggggtggtatgaattgggagaaccctcctgggaggcattttaacagtatgtctcaaagacactcaaagatggttttgttttgtttttgtccagtaattcttttcggaatttctccaaaggaaataatcagtgatgaggttaaaaaaaattgtctatatggatgctcattgcattgttggtgaaaatttagtcatgatgcaaatgtcctgaaatgttcagtaaattatggtaggttatagtgactgaatagaatatactattagaaaatcacattttcaaataatttttattgtatggaaagatctaaaatactgtatatataaagatgatcttcattttttaacaaattaagtataagtatttaatatatgtgcattgaaaaacacagagaattttcatggataggatctgtccccatctcagggttggggcttggctcctgaaagaagggtcagaccctagagtgttcagctgggctgcagtgagatttgagggtgacgatcctctagctgaaatggactctaattctcattgactccaaaactggagttcggacctttttccgtctaccgctgtgtcttgatctgcctcctggccccttttccctcaaggcactagggagacaggagggcccaggaaatgccgagtgccctggcagtttccttcccaccttctagcctccagttcccaagcctggcatttgcttcttttgaccttcggtactcagtagacttactgtatgggaaggaatgctgtccagtcgtcttgagttgaacgttctcatcaatactttggtggctcttcccatatcccagctttggacagaatagtcagttggaattaaaataatttaattcagtttagtgaggtctatatgtttgtctgtgtgttattcctgtataattttaacagaacacagtaggacatttgcatatttcacagcccgcagtttggaaatacatttctgaaagaagttaccctgaaaaacaatcagcgggcaaataatttgatgatcactgtaacttttaaagaaaatcttgtgcaatttcagttactgatgatctttttccaggaacaaaaatattcatatcatttacaaattaatctatcaggaatgagtgtttacatttgcctacaatatttagtgtgggattactcaaatcttttggttgagtaatacttggtgctgatcccaaggttatacaaggagcaccaggatttctctcctgagacctttatgtcctgagccctttgctgtctccatctacccgctttaggagatttccagtgcccaagatttaagggccatttgtatgcagatgacagcagaatgcctgttgagcccagacatgtccctggggctccacactaggggacataactgctcacattttcaatgtataagagatggataatatataactggtaatgtttacttaggtgtctcgtctctaagtgcctcccgcgaaatatgcccaaactgtgcccttgagtcccgcatccccagatcttttctttgccctcccagtaaatgatcccaccacacatccatttcaaccagactcttagaatcttccagttgtttctttctcttaccacagtcctagagagcagttagtgtctgatctacctttaccatgtatctcgtatccacctgcatctttctgtccccactgctgtcgcaggcttcaggcctgcatcacctttcattcagcgtctgcagcagcttcctcactgggcttcttcgtgccgctcttgctccttctcacacaaatctaaaatttttttcctgatttccaagactttatattccacccttctgtgaatctgagtcacctagggagcttttagttcattagttaatgaaagacagggtctccctctgctgcccaggctgcagtgcagtggcacagtcaaagctccctggaactttgaactcctgagcgatcctcccacctcagcctccctggtagctgggactacaggctcacacaccacacccagctaatttttaattttttgtagagatgaggtctcgccgtgttgttcagactggtctcgaatttgtgacctcaaatgatcctcccacctcaccctccgaaagcactaggattacaggcatgagccaccatgcccagccaggagcttttaaactatgtatctgtgccaggaccgtcacccccaagatacagattaagttggcatgaggtggggccaagacatgggtagttttaaaagctccccaggagatgcagattgacagtaaggatggaaagtcactgctctgtatcagtgcttcttcagactgtatcagcacatcttcatgagctgaaaggctcacctgaccacccctctaaaacagtctttggccactctcaatctctagtagatcatcttaattatttattttataggaattaccataatttgtaaatgtatttttagttattaatttactcacctgcctccccctggctaagtttcattcagtacgtatctgttggttatatttggaccctgcaagggtggaaggtgagcttttgcttctcacgcgcatatattttttttccgcaaatcattgttaagtatctcgggaccgggcaagggatgcaaggatgagtggaaacatggctcttgtcattgaaagccccagagtctaatgaaagagtgagacaagcaaacaaatagctgctctgtataccatggacgctatacagctcaactcaaagagggattcaattgtcaccgccctgggaaggcgccagtgaagggcctggaaaagttaggggttagtatgttaatacagctctctccacgacaagaagaagagagggagagccttctaacccatccagcccctttgtggtggtggtggtggtgcactgatgtgttgggctttagctttggccgttagggatgtaggagtgtgtccttcctttggagagaagctcagtttgtcaggattgtcctgctcccaccttcatgaggctgctttgccaactacactcctttttttcctcttggaccgctggtgaggagtggatattttacccccagaagactcttaagtgggtcagaacaacacatgaatctaattaactgcaaaatcactttgacctcaaggtggaaaattcattccatattaagatactccaatgaaaggcctacattcattgtaataatagaatgcccataagagacactccatatttgaatattaattctatctcattatcagatttccagagagatattaaaatccaaagataacattgcattttaaattaaagtccaaaggcattaaagtccaattctcttgcccatgtgtgttcaaataaattgaaattcaaaatatattctccctgatttcttattctgcacaatcccagttagaggggctcttaatgcctgtatagggtcaggatttttttgtaacagctgcagtctggactgtctcttgccggaatgtgtgtggttctttcaggaacacccaataccaaacctctgatatgcctcacttcttaaaattaaaaaagttaacaggacacgagattatcaaaacattgcccccccgccgccccacacatacaccagagttagaaaacaagccaattcctggtcttctaatagttaccccaagcaaaagtatgtctccagaaaccaatacttcttacttgttgccaactagcagaccatagcagaaagtctgtgatatctgagggaaagatggagaaagtcttcatttctgcttcagcagatttcagttagtctctgacagttggggggctacacatttgggagcaatctcctcagtaatttcttggatcttgctgtcagtaattccagtgagtcaagaccatgccttgcttctctcatgggttttgtaggacccaatcacagtttctgttcaaatagccactgaaacatctactcttttctacacttcactgtaagtgtgttagaacacagtgcgttttcattcctctttatatctttttatcctgaccttctagatcttatttcccatttcatttatttttattgtttatttttcaagacagagcctctctctccctctctctgtcgcccaatctgcagtgcagtggcacagacatagcttactgtactctcgaactcctgggctcaacccatcttcatgcctcagcctccccagtagctgggactacagttacacactgtcacacccagctaattttttaaaaaattatttgttgagatggggtctctctatgttgcccaggctggtctcaaactcctggcctcaagccagcctccctctttggcctcccaaagtgctcttactccaaaaaacattactgttttccagctaaatcagccttattgctttagtttgtttttattcttttgttgtttctgttctgatagtaagactgaaatactttttacatcattctagttcctctttgattttctgaacatccttgatttctagagatagaacattttaaacaaagaccttttaaaattatagtattttattgaatttatttttctatatcagtgccaggagacagtatccttgtgttttttttctggtcttagcatctatgtaaactttcctttacctatgacatttactatgggtttctgacacatagcctttttgaagttaaaaaagttctctagttttctgataatcaaaaaaaatcataaataggggctaagcatggtcgggtactttttctgtgatggttgatattattatgagtacattaatgaggttcattgtagattttctgatccacttgaatctattcttgcatttttgagaaaagtctgcctgaacatgatgtattattgtagcatctttgatttagttatgctaatattatttctagaatattttaggggaaggggatctattttcataagttaaaaaggcctttaatttctttacagtggtctgtctttcctggttttggaacaaagtcatactagccttgtaaaatgagttggaaatctttccttatttttctgttgttttggaacaacttgtatacaaaatacatgttctgtttcttgaaaattgggtggaactcgcttgagagctatttgcgtctttgtgtttgttagtgagtcttggtcattttagtatctttaaaaatttttgttcttttaatattttttcttattttcttcccaggcacagtttattttggaattcagataagaactgacacttataagcattccaaatgttaataaacattttttcttcaaggcaattaccttttcttaagctcaatcttagcactatcctttgcaaaaacaaaaattttaaaaaagtctaaatagattaaaatagaagtcaattctacccttctcatagaaattattctgaaagaattagaagattcaatgatataaattagattaagaggaggtagacttaaatttagtacctaaaatataattatatttcactaaataagaccgttattcttctaaagaggtcctctaagctggcttttattctgctgtagtttcatctcactaagagggaggacagtaaatcaactggtcttaccaaaaagtttccactttttagtagtgagctctctagcttcagataacttagaagtttatcttttcccccttggtaaccactttttctccaccgttcttgtagttgttgtaatagagccctggtttcttttcccccaagaaatgtccccttttctggtgtcatgcccactgaacaggaactgtaggaagggaccacagctgcctttcctttaggggatggtgctctccttggctcttcagtagttcacgtatgtgagaagtcacggcaagttccctaaagtccctgagaaagtcttggtagggtttcagtggctctgaactatctattgctttaattcagtcttttttatttttaactataaacaagccaaggtttttctcttcttttgaaatcgtcaacctccaatccaattttgtgacatcattctgtactttgaataatgaggccaaaagagtcattggctttggtgaaaaaccttcgacatttttactgactttgttaaattcttctaaacttgcattggctgttatacctacatagggagccacatgaagatcatagataaggtgaatcaaatgatttacatgtttactgacaagagcttttttagttccacccaaatgctttctcctaatagcccagccaggccttttgcaggctctgcagttgcttctcaggaccgtggtcaccaggtttgtctacagttctcccacaaaacctgacatatcttaaaattcaaaaacaattgtattgtactctgttgatgtccaacagacttttcttattttaaaaaatctccataaccattaaattagataaagtaccatcaaaacccaaagacatagaattgtttgctagagagctttgtgttcagcatctcctagtcagttgtgaatttgtcctcagcatgtcttccatcagtgacaacatcagtccagagtgtagtaatttaaaaattgtcttcacgaagcctggcagtaattgttctgtgcttttctgctgtccatcatccaaataccagctgacggaaacatctactgcatttcaataagggtaacaatggtagcagagtccacatcttgaggtcttattccatttaataaatctctcactgctccttctgctattctgaattcacgattctctttaacaaataattctgtcaagctcttcaatctttctgtgacaaatgactagaattctggagcctgcaccttcattttaggcagctattgcttcagaagtcacagtctgttccaccagcctttgccaaggatgcaggtgccacagcatctcaagagaagtcaccaatcacacagctccatgctgaggccctcttgcctgctactgaggagctcttgccacccccgattcctgcctttccccagtgatgcaggacaggtaagcccccaaattgggacttagcctgggaaggttcttggctttgcccgggaaataattcaagggtgagctggtggtggtaaacagcaactttgattgaagcagcagtgtatagcagcagcagaggtgctgctccttgcagagcagggctgccctataggcagtgtgcccagaatagcagctcagagacaggtctgcactcatatttatacccacttttaactatatgcgaattaaggggcagtttatgcagaaatttctaggaaaagggtggcaactcttaagtcatcaggttgttgctgtggaaaggggcggtaacttctgggtgttgccatggcaatggtaaactgacatgacatattggtgggtatgtcttatagaaaatggcttccacccctgacctacctgttttagttagtcctcaatttggtcaggtgtctgagccctgcctcctacctctccaggacatgggcagtagcctggctgggcactttaaaaaggacagttgtatccaagcctttgatttttttctgtcaattttaacattttctgtctcagaaatatctatttcatctagattttcacatttttttcataaaattgttcatattttaatattttatctaggttgtctaaaacctgtttctcccttttaattctattctttcttaaaaaaaaaaaaaggatgtctcttttttccttcctcagtctttctggaattttccattctattaatgtttacaaataaccagcttttggttttggctaatcttctctgtagtgttgttgttctaattcactgactttcttgcctgtcagtttataagaacaaagataaaaatgataacaggctttccttcagaaatgatgcaagacaggaatcaatggaatgacatcttaaaaatactaaaggaaaactgttaatctagaattatgtatccagccaaaatatccttcaaaaatgaaggtcaaaaaaaagaaggtaaaatgtcctgtaagaaatgttaaatgaagttcaacaaggtgaaagtaaatgatagcacatggaaacctgacctatacaaatatatacaaaggatcagaatccctggaaaagttaaatatatgggtaaaaagaaaagatttctattctcacttttaattttctttgaaatgtaattggctctttaaagtaatcataatggcagtatattaggggatttttaatgtgtatatagaagaaaaatatatgagagtaattgcccaaagattaaacagagtatacagttacaacattcttatattgtatgtggggtagtatggtattatttgtagatagactgcaacaaggtaaagatgtatactctaaactccagtgcaaccacttttagaaaaagagagagacagttaacaagccagtattggagaaataagtggaatatttaaaaatgctcagtctcaaaagagtctggaaaataagaacaaagaatagtgaagacaaatagaaaacagatggcagaatgataaactcaatcatgttgataaatatattaaatgtaaatggcttaaatatccaactaaaagactactagaatggattctattctattctattctattctattctattctattctattctattctattctattctattctattctttttgagatgaagtctctctatgttgcccaggctggagtgcagtggcgcgatctcagctcactgcaacctctgcctaccaggttcaagcaattctcctgcctcagcctcccaagtagctgagattacaggttcaccaccacacccagctaatttttgtatttttagtagagacggtgtttcgggaagtcagggaccctgaacggagggactggctgaagccatggcagaagaacataaattgttaagatttcatggacatttattagttccccaaattaatacttttataatgtcttacacctgtctttactgcagtctctgaacataaattgtgaagatttcatggacatttatcacttccctaatcaacactcttataatttcctatgcctgtcttgtctttaatatcttaatctcgtcatcttcataagctgaggatgtatgtcacctcaggatcccgtgatgatcacgttatctgcacaaattgtttgtaaagcatgtgtgtttgaacaatatgaaatttgggcaccttgaaaaagaactgggtaacagcgattttcaaggaacaagggagataaccataaggcctgactgcctgcagggccgggcagaacagagtcatatttctcttctttcagaaagtgactaggagaaatatcgctgaattcttttctcagcaaggaataaccctgggaaacgaatgcattcccagggggaggtctctaaaatggccgctcagggagtgtctgtcttatgcagttgtagataagggatgaaatactccctggtctcctgcagcgccctcaggcttgctaggattaggaaattccagcctggcgaattctagtcagaccggttgactgctctcgaaccctatttcctgttaagatgtttatcaatgacagtgtgtgcccagcaggacatggaccttcatcagtaattctagtttcgccctggccttgtgatctcactctgcctctctgcccttgtgatatttcattgcctttgaagcatgtgatctctgtgacccacaccctgtttgtacacccctccccttttgaaacccctaataaaaagttactgcttttgtggctcaaggggcatcacggaacctgccaacatgtgatatcgctcccagagacccagctgtaaaatttctctcctttgtactctttctctttatttctcagaccggccgacacttaaggaaaatagaaaagaacctacgttgaaatattgggggctggttcccccgatagatggggtttcaccgtgttggtcagactggtctcgaactcctgacctcaaattatcctcccaccttccgcctcccaaagcattgagattacaggcgtgagccactgtgcctggcctatactggattttgaaaggcaagactcaattatatgctatgataagaaatatactttgaatataaaggtgaagataccttaagagtgaaagaatgatataccatgtaaacacttataagaaagctggagtggctatattaatattagacaaaatagacctaaggacaaagaatttccctagatgtaaaagagtgatatttcataatgattaaagggtcagttcatcaagaagacataatagcctaaacatacattgctaatagcagaatttcaaataactgaaaccaaaactgacacctgaaagaaaaaatcgatctgcagtcataatcggagatatcagcgttcttatctttataaattacagaacaagctgaaagaaaagcaggaggaatatggaaaactggaataccatcagccaccttgatcaggtgaaatttagtgaacactgcaccaataacagcatgtatgttctttccagtacacatagaacattcaccaagacagaccatatgctggggccataacagtgctcaataaatgtagaagaactgaaaacatagactatattctgtctctacagcagaattataagttaaaactataaaatatctctaatatcccaagatatttgaaaattaaacagtacacttctaaataacccacatgtcatagacacaaccatatcgaaattagaaaatattttgaactgaataaaaatgaaaaatggcatacctaaattgtaagatggggataaagtagtgtttaggaaatttaaaatacatgagaaaacaagacagatttaagatcagtcatcttagtttccaacttaagaaggtaataaaaccaagagtagattaaaccaatgtaagtagaagaaaagaattaacaaagataagaatggaaatctttgaagtagaaaataaaatagacatagagtggagaaagtccatgtaatcagaagctggatgcatatttaaaaagattgatcaatctttccagataaatctgtctacctgtcaagaaaatgacacaaaatataaatgacctctatcagcagtgaaagaggagacatcattatagatattacagacattaaaaagataataagagaatagcataaacaacttgatgccaaaaaattttgacaaaatagatgatatgaacagttttcttgaaagaaacaaaataaaaactgaataaaggataaatatttttaaaaattaaatgtgtagtttaaaatgtttctacaacaaaatctccaggcacacatagtttcagcagtgaattctgtcaagcatttaagaaggaaagcatatacccaatctttctctttcataaaatagaggagggaacacttctcaacttattttatgaagccaccattactctgttcccaaatccggacaaaaaccttaaaagggaacaaacaaagtaactacagagcagtgtctctcatggtcagaaacataaaaacacttttcaaaatatcagcaaagtggatcttgtaatacagaaagtgataatgtatcatgaacctatgatggtttatctcagccgtgcactgttggtttgatgttagaaaagcagacactttaattctcccatattaacagaataagagggaggaaacaatatgattatctcaatagaggaaaagcattcggaacaaaatttacactcattcacgtcaaaatttgccacaaactaacagtataaaggaactttctcatcctgaaaaaggcatctatgaaaaaaaaattcaacagctagtttcatactttatgatgaaacactgctctctctctgacatcaggaacaaggcaagaatttctgctctcaccactccagtaaacaacgtgctgaaggtccagagcaactcactaagccaagaaaaatcagatgcatgcaggttggaaagaagtaaaactggctttattcataaatgaggtgatcgtgtgtgttaaggaactgataaagttatgagaagtgaattttgaatggttacaagatatgtaaatgaaaattaattatataaaactagcaaataataataagaaaaaatttaaatgccacatacaatagcatcataaaacatgaaatatttaggaataaactttaacgaaatatgtgcaagacctatactctgaaaaccataaaacattgctgagagaagttaaaatttaacagacagctcaatattgttaagtgttagatctccccaagttgacctctatagagtgaatgctataccagtcagaatgccaggagacatttgtgttttgttttttgtttttcttttgagacagagtttcactcttgttactcaggctggtgtgatctcagctcactgcaacccccgcctcccgggttcaagagattctcctgcctcagcctcccgagtagttgggattacaggcgcctgccaccacgcccgtcccaggaaacattttttataaaaattgatgagctggttttaaaatttgaaaatgcaaaagacctagaatagctgttatgggttgaattgtatcccccaaaattcatatgttgaattgctaaaccccaataccttacaacgtgaccttatttggaaacagtgtcattgccaatgtaattacttaagacgagatcatactggaggaggatgggcccctaatccagtatgagtggtgtccttataaaaaggggaaattgggcacagatgacacacagaatgagaatgtcatgtgaaaatacagacagagatctaaaaaccaaggacaccaaagtttgccagcaaactatcagtagctaaagagagacctagaacaaattctccttcatagtcctcagaaagaaccacccttgccaacatcttgatcttggacttctaccatccagaagtgtaaaacaataaattcctgtcttttataccatttggtttgtggtactttgttaaggcagccctaccaaactaatacaattgccaaaacaattttgaaaacaaaacaaagaggattatattacttctttcatgacttactataaagctaattaagatagtatggtatttatgtaaatatagatgtatataccagtggaacagaatagagtccagactcagtggagaaaagatatatttttcaacaatggcactggaatgattttatatccttatggagtaaaaaagaacctagactcttaatttataccaaacaaaaattgatttaaaatagccacataaaagctgggaatacaaaacttgtagaagaaaacattatggatatattgaagtaggccaggactttttagaatataaaaaataccatgaaaaaatgttttggtaaattgtatctcatctatattaaaaagtcaatgctctttgaaacgtattattaaaaaattgaaaaaacaagccatggtatacgagaaaatatttgcaatacatatatccgacacaggacttactcatatgcagaatatgtaaagaacctcttacaactcgatgagaagaaaacaacccagttaataaaatgagcaaaatatttgaataacatttcactaacgaaacagaaatgtcccataagtacctgaagatactttacattattagccatcagggaaatgtaaattaagaccacagtgtgatgctgcctaaaacggctgacaacatatcaagtgttgataaggatctagagtaactccaatacattgtaggggagaatgtaaaatggtacaactactttggaaaaatactgtggcagttcttaataaagttgaacatatacttcatatgacccagcaatttcattcgtaggtatccacccaaaaaatgaaaacatgcacccatgaaaagatacagatgcatgtgttcatagcatctccattcattgcggataaaactggtatcaacccagtggccatcaacacatgagtggataaataaatggtagtatattcataattagaaataaacaaaaatcaatgatacatgtaacaacgtggatgaatctcgaaaacattggaaaacacttttcattaaacccatttgtgttatagaacggacaaaatttacctgtaatgacagaaacagatgcctaagaggagatggggcaggggcgaggtgagctgcagtgattgcagagctgcgcaaggagcttttgggggtgatggaaacatcccatgtcttgatttgtttgtggctgtgcagatgcacttggcagtttctgtaaattatacctcaataaaatgccttttagaagtaaagaaaacgaagcaccaaaggggatagtgtgtggagggcagtgcgttaggtttcaggcgtttcttctgagcaggtcttacaggttggcttggtgggtgctgtttggctttggggagatcaggcgttttcaccttggctgtatgttagagtcacctggagagtttgtctaaaacactgatgcgcagaaatgcagattcatttgttctggggttgggaccacagcactggcactttttaaaacctcccccaagtgattctaagttgtagcctaggctgaggagcactggccagactttggctctgagttttctctctagagagtgtctgcaatgcccaagccacttcttttttacttctgcttgagtcacaccatatgttgctgcccaggcattgtggacaaaagcagcagctcaggcctgaaatgcccactgctaagtggcacaaaacaccatggaaacaaatgcaacacaaagatcaatggtactatatttttgtgagacttagaattgctgtgtaaggctaaagccagcaaaagagtatggatggaaattacaaatccagacatacacccagttaatgagacagtcaagaacaacattacactaacttagaataaccccatatctaccaaatttcttatgattgtagaagtagatctttccatattcaaactttgctgaaggacagctagtggttggtgaaggattaccatatccagctcttttcaaatgtggatggtaaaggaaacctttagaatctcagagccaaatgaaaataatattacaaatcattgccatttcctgtggtctcatgatgtgctgggcaccatgctggatgctttcccatacagtcctcactgtacacctgggaggtgggtatggccctcttgtttcatgtaagaaaatttagacttaatgaagttcagaaacctccccaaggtcacacagctaacaggctctgttttctgtcaacctagtaggttttcccaaaggagcttggttattaaagttgggcctgtacccttagcggagtgcctactctggcattattggctaatgtgggaaagaacagttcccaaatctatttgttgtcctctgtttacacttcatttccagaggctaaatgttaatttgtttaagccaggcttattgtctcctggagatgcactaccacgggaaagtgttgactgagcttggctcctcagtgtgaactgtaacttgtgactcattaattacgggcctacaatcaactcccaacatgttagtaaagaaacaaacaactttcttgtttaatgaagtgctgacagaagaaaacttaattgtttctctcctgccccaacattagcttgacacttgtagttatagcagtaaacttggactttgtaaaaacaaaattgtatcgtcagtcacccttcctgaaggtgctgtattggtgtctgcttttcccagtgaccttaacctgtgttcattcttaagtatgtaattgtgtatttgtcataatgccgctgtcatccttgtccagaataggtcatttatgttgtaaacgtttaatgaacttctataaatggttcccttgtatcctttcctaatgcagctgtatgaataagaaatatttatccaggaacgcataccctcagttgacacacaactccagtggaaccatgatttttaagaactctttagttcacctttattgcctgcttaaatttcagtttttaatgtgtgatttcatttccttcaaagaacatcttacccatttagcatatctcaagagttctactttttttttgtagaaagtgaggtgttttccatgcattgaataataaatcccgaatacttttatttctcactaatcaaaaaaaacctggtttttgaaaataaatttgaaactttgcctaatgcagagaagaagtgtaaattcagccctgttgaagtaattattcagtttcgtcatgcatttaggagctactgcccaaccccttgttcctaaatgaactaattgcatttaacagtgtgaatgtcaccaactactgctatcactcccagtgctctttattgagtatttactgtgtgctaaacacactcacagttactctttgaagaaggcactatcatccccattttacagaggaggaaaccaagtcttaggggtttcttgacttgcccaaggccaacagatctcatagccaggctttgaccccagcagcctggctccacagtggccactcttaatccctatgccgcactgcctcccagttccatgagcttcatgtttcatcttatcttccagcttttgcacatactcttccccctgcccaaaacactcccacagtcccctttgccttatttaattcctgttcattcttctcatcttaagctaaatgccacttctttagggaggccttctcttgtgagccccatgctatatgttcttctagccaaacaaactatgagcgtgaaaaccaacctcaatctggcgtggagatgcacctatgttccagaagggtttggatcacacatttatggagagctggtgaggacgagctggattctttcctctcagtgacacttatagggcccttgcttcttttctggatttctccttatcttcatcccaatatcggtcagcacaaggcaaaggcatttggcatctcttctttcccatttgcagactttactgtacgtactttactttacgtacaggatgcgtacgtaccccatcctgctggtagacgtggggcaggttatcagaggagaagtgggggtgtgagggcatccttgggaagctttggatacagtctcaggtggggtcattaccaacttggccataaaactctctctgtgcttctcaaacacatgatcccccctccaagacccactctctatagtggtcgaaccctccatgccagtgcttcctaaactagctgtggtgaagagccacttatctttccctcaaaccatcctggacctacatttggataggatatagtataaaatgaatgactagaaaaataaatctaaaaaaaggcataagaattcaagcccaaatttcatcgtaagattcagcagacaccgcatggctgtcatattgtcggcagtttctcagctccctcccttcagtgtctgttcctacaaactgacagtggtctccagacctcaccttgaatagcacttattaggtcagtgaccacaggaaggggacttctgagcctcacttttttatctgtaaaagggaaccaataatacttactctagcatttcagaattaaacgaagtcattaaagcatctgattgcctagtatatgccaggtgtctactaaatagtagttcatttcccatcacaccttcagtgcctggaaaaaattacagaaattagatggttaccaactaattttttctcttcttcctggcctttgtaaaataaggatcgttaatagattcctagcaagcctgtgtgttagaatcagctggagatctggtttctttcagcgggacatggcgtttggaatagttcatgttcagatgactgaatgcagtttaaacacttctatgcggttctgtatcatcttaggttatgtatatctcactagggatgtaaagtcaaaatactgtttaattctgaaaagaactttattttatatttcattagattaatttgtatgttttcaatttttataactttaaatttaattttttaaaagtagataaaacacagaggattccaaagtcaaaattatacaaggcacattcacagagtctccattcctgtttcctccaccccattctcttctttaccctgtggataaccattatttgtttttggtttaaccttccattgtttcttgttcagagtatttaaaaatactcctttatcacacacaagattctcatataaggctattaacatgttgtaatctggctacatctcctggcgatcctcccgcagcagtccatcagcaatcttctccactcacattcacagccatatagcagtctactgtgtttgtaccgtagtttatgtaagcaacccccattcgtggagacttgagttgtttcataataagttgtgctgcacccagtatcattagtcatcagaaatgcgcatcaaaaccacaatggcataccacttcacttacactagaatgcctactacaaaagacagacaatagcaagtgtttatgagattgtggagatgctggaaccctcataaattgctgggtgaaaatgtaaaatactgtaaacactgtgaaaacagtctggctgttcctcaaatgtttataactcatatgatctagcagtttgactcctaggtatatacccaagaacaatgaatacttatatccactcaaaaacatgtacatgcacattcagagcagcattatcatgataacctagaggtggaaataacacaaatgtccattagtgggtgaatggaaaaatgcaatgtggcatatccgtacaatgcactgttcacgttactcagccgtgaaaagaaatgaagcgctgacatgccacaacatgggtgaaccttgagtgaaagaagccaggttcaaaaggctacatgtcgttcagattttctgactccgttataggaaatgtccagaataggcaaatccagagagacaggaagtagaaggatagttgccaaggactggggggagggaagaataaggagtgactgccagtgggtgtggagtttcttttaggggtgaggaaaatgttggaaaattggatcatgctaatggttatataactctgtgaatatactgaaaaccaccaaattgcacactttaaaagtgtgaattttatagtttgtgatgatgtctcagcaaaaaatgaactgggccaggcacagtcactcatgccgataatcccagtgctttgggagaccaaggcaggaggatcacttgaggctgggagtttgagaccagcctgggcaacatagtgagacctcatctttacaaaaaaataaaataacaaaataaactatgctgtagtgaataaccttgtgtcacacattatttcatggggtagtgtgcttttgatctgtaattttagaaatggggttactgggttatgtgtcattttgctgcttacacccagttccctttcatgggagttgtaccattttccctccagcagtgtatgagagtgtctgtttccttgtggccttaccaatagcatttgttgtcagacttggttatttgttagtctggcaggtaagaaatgtgtataattataatttgcttccctcttatgagcacgtttgaacatattctgatgtctttttagtttatttgtattttcggtgccatgtatgtttcatgtatctcacctgtttttctattgtattgttggtggtgtttaaatttttacaagttctttatatattaaaatattaatcctttgcaaatatcttccaaatccgtgataccttacaaataattttcccagttctcatttgccttgaaaaacaaatagtcaaattttaaaacctttcccctgttgcttccggattgaatcatagttaggaaagcttttcctattcccagcttagaagaggaattcacccatgtttttttctagtactgattttctttattatttaagtttagatctcatatctatctggagtttatcctggtgaacaatgttaggaagtgatctacttagattcttttttatatggctacctacttgccccaatatttttttttgaagtccagtgaaaataaaataaaatatcactttttgtttacatgtctgttttatgtagttctgggttgatatagatatttcagataatagtgcaaacaatattataacattgagtaagaaaacacaaaaggaacaagtcatctgtaatctctgactatagccatgctgttttcagtgtataaacttatcttctttctctctaggtaaatgagctggatggtatcccgttgatcctggacaactgcaacatcagtgacagtaacccctgtatccttgcatgtgaattaccatgcacaagtttacagccggggcccttagcaaaacaagtcccttgcctcatgttcattcagtatgtagctggctgccttgcttgcttgtttacttgttcctgagaaccaaatcattttctcagagttatggtgctagaatatcatttctgtaacctttgtagtatggtaagctagttttttcatggtgaataagacattccaaatgagcatgtggccaaaaagcactttaaaacctggggcacaggcagcccatgcaaggcactgtgctgcgcatcaccggtgtcacctttccagtgtgtgtgtggtctctagagtagacacgaactatggcatattgttttgctatagagattctgagtacccagtcttttggaagtactgttttaacaagggtttggcaacgtagaaacatgaggagcactctggctccctagcaagaggaaggagcatctcagtggtgctgaattctcatcttcggagggtttgtcctgcagccctctgcggcagaagctgagagcactggctcttgccctggcttgggttggccacccttgctggagggtgttctgcagggaccctgcttttttcctaccagttcaactagttgtactatacaaaactgtacagtggtgactaaccagggaccggatacagcttgtttagatttgagataaaacctactgtttaatttcacgaacttccctggtgaaagccaaacttagctgtgtcccttgtcctggtcactgcttggctggtggtggggcaggggtgaataaggctactgcaaggactgggagcgtagcctgcgggaggcagtgaggagcctagcctagcattgaggagactgaggaggggggcattttaaaaataaaactatggcttctgccaagaagagaaaagcagctgatgaaaatcatgtgtttcaaagtaagtagactgagcgatgcttattatttgtgctgaagatactgtcatttgtctgattagcaatagaaaacaatcttattttaaagagcacagtagcttgtaagttcagtcaggaaaagacaaatacacagcctcagaagactcctctgcagggtaaagcaaatttggtttagtgcgtggcattatcatgagtccctgaaggctgtgctcattaaagagtgttgacatttttttagccccccaaaaaggaaagaaaaaagaagaaagcttctagtcatgggaaagcagtacgagaatgttcaggtacaattgcagatgttgcatttcccaatgaaaacgatgatttattatgaaaaaagaaattcactcacagtttacttttacattccctgaattgaccttccagtgaagcagggtgttcattgcgtctttggcttttagcaaagaccagaaaataaaaagactgttgtacacgagcacattgtaggcctacagatgctcgcagcaccttccaccttggtgtcctccttgccagatggccatccgttcattcagttcttccttcaggaaacattcattcagtccctcttgtgtgtttacacccattgccttattgaaccctgacaacaccatgaagcagatactatgattatcatccgtatgttgtagatgatgaaataaaactgagtctctagcttgcccagaggtcagaaccagattttatacatgtgagtgcctgaccttagccacttccccacactgccttcttaaaagtcaccgggaggagacagagcacatgcagagaaccacataaacatattcatgtagtggagaaatggttcaaagttacacatggaaaaatttatatggatagctatatctttagctggataactggcttttagaatgataatcagtgaaatattgcaagatcacggaatctcctgaatcattaagaaaagataaaatatcacaagcatctttagtgttatgtgtattcagtaattctttggagttgtatttattaagcttaccagattttaaaggcatataaaatgtggtaagatatgagacacatactgaaatatcagtgcaaagggagaatggtagttgaatggtcagaaacgaaaaagccttacagcctagagattcagtttttagatctgagctataaattaaaatctggccttcgtagtactaaagtaaataaggacatgatacaatttcaaaattcaccttattccctaggtaaaaccacactgatgcttcttccaggccattcccaaagaattatctaatgactcctactttactcctcgcttcccattcactctttccccccctttcttgtgcattttttcctttatttttttaattcatgaaaataatacacctatatggggatttttaaattccaaaaggcattcaataagggaacaatatctctagctccactttttacactttttaattcactctcttagctatttcttctagtaggtacttttgtatatctaaataatatgctttattgctgtttcttgatatatcaagttttggtgtgacctgtttattttatgacatgaacattcagctcctgtacaccacctcctcccctccctcccttgtgcttcccctggagttaggactgcacatcccgttccctgttgcccacgctgtaaatgaggcttggcatcttctgaagtgtttgctatttgaggtgtgtgtgagtgtgtgtacgtgcatatgtgtgtatacattacaatgtccttggtcaaaccttttgcccattgggatatttttctttattatttgttaacacatctttatatattctagattgaagttctttgtcagctacatgtgttgctagtattttctctttcctgttctgtgattaccttgtcattttctttatagtttcttttgaataacagaaattctttacttttagtcaaattcatctcttttcctttatagttaaggttttttgcacgtgtatcttgttttaagaagtatttctttaccctgaggttatgatgataataatatattatcttttgaatgctttatagttttaccttttatatatatatgtcaaattcatttagagtcagctttggtgtacggagtgtgttaggatctatttctattctctccagatggcacacaattgtcttggccctagttactgaaaagaacatgtgtttgttcactgtagcgccacctttatcagaagaattgatacaagttttgagtctgtttgtggactctgctttcttttccattcatctttttgtctatccctgcatcagtatgatggtcttaattactatagctttccaatatgtcttgataaaggataagtcagttcttccaatttgtctcttcttttgtaacagtgttaggaccatttttggtcatttgtattgttgcataaaagttttagaatcagtataaattctacacatttggtcgtgtgcacatgcacatacatgtatatacctgtacacacacagaaaacctcgtttaccactaacaaaaacaatttaaagcccccacatactgagttattcattgaaattgcattgactgaaatgaatttgatgagaattgacatacagtacttagtttccaacccaagaacatcttatatctgtccgcttatttaggattattaattttcagttttactcttttctgtgtacttcttgaactccattgcatggatttttgtatgtattactttgttgccattcatttaaaagtgtttttcaatttttattataacttcttttttgactcgtggattattagaaattcatttccaaacagttgagaattgttcagttatcttttggagcttgatttctagtataaatgcattgtgatcaaatagcacctacttgatatcctctgtcttatgaaatttattgagacttgatttatgacctagtaatatggtcagtttttgcaaatattctatgtgagcatgaaaagcatgtctgttttccagtagtggggtatagtaatgtttatacatacattaggtcaagtttgtaaatggtggtatttaaaacttttatgtttttactgatatttttgtctactttgatttatcagagaggtattttaaaatgtcaacctttgattatggattcatctaattttctttttcattacataaattttccctttatatgttttgaggtaaggtttttaagtaaaggtgtatgataggtcctgagaaatagtcctgttatcattatgaagtgaccctctttatctctaaaaatgattttctgcctaatattaatatagctatcctagcttgctttggattggtatttacatggtacaattttatcagtccttttattctcaacctttctgtctgagatgtgtttcttgtataaagtatatacagtcatgtgctacatagtaatgttttggtcaacacagacccatattcaaccttggtcccataaggctgtaatactgtatttttactgtacctcttctatgtttagatacacagatacttatcattgtattataggcacctacagtattaagtacagttacatgctatacagttctatagtctagaagcagtagggtataccataccgcctgggtgtgtagtaggttactaggtaatatagcctagaatgtgagtacattctgtgatgttcacacaatgatgatattgtctctatccccagtgccaccatccagtccacacttgcatcattgctggccctgaacttcggcagtgacttcctaactcatctttcagtttctgctcctgctgggtccaggtgatttttgattccccattcattcagtgtcatgatctttgaaaaccaaaactggatcattcctctctgattctcccactccccacaccaccttgcataagcatgcccctgttcacagagcctcctagacggcccatcatcctcagaataagcctagtctatcacattctaaaaggtcctcttcatttgtatccagtgctgttctccccttcttcagcattccccaggcacacctacgtttttgtttccgagaaggatctcagttcctgcgtgaaggcagttgtccaagcacatctctgcttgtgctcctcctgggcttggtcatcctcatgcttcacacccagcgttctgtgtcttttctctcaagtcccagctgagataggccacccgctccgatccctgccaaaacttgttctgttccttcagctcatcacaggttattgttaaatatgtgtgcatttatgtctggattacccgctggattgcttcctaagggcagggatcaagttttctgtgtttcacctcaatataaatataccattgtcttgcatgtagtagataaccaaaaaatatttcttagatagatacctgaatgggaaaaggaatgaacaaataaatgagcaaagagcagcttggtgaaatatgtgtatgtgtgcgtgtgcatgtgtgtgtatttatttatctggggggagagggtggttctaagctcaagagaaatgtctcccatgagttctttgactcgggtaaattaagtattcttggtttgtcagtcatattatttaaaatttggtttaacccatttttctagtaattagcaccatccaagttttattgaatttaattttagtattttgtgttaaaaagcaatagatattttgggcatgctgagactaggaattagtgctggtgtcgaatatccactaataacaccaccactcttctctgagcactctggataatgtccttcttgggacaggagtgaggcctgggatgcctttggataggagtctacccgtgccccatgggacatctgcagtcaggactgtatagaacattccacttttgtcggccaccctacgggttaggaaatccaaactggcctgtcagagcagattagaagcaaaaactgccccacagtaggggatggggctggaagggttccttttccgtttcttggaggtagcttttagagaccaccagggatttccaaatccagggaaaaggcaccagctacaaggggaagcttaactctgaaggaccgccctgactgctgcctcctcagggacacgagcccaactagtgcccagctgttcactcgcccaactcacttttgggtcacccacagtaatgacacagtagccaatgccatcggaaaattccagctccgctaccacagaggcaatttcttatttgtcagtttattgtgggattttttgttgttgttgtttccaaatagaaacagctgaactttatttgaagtgttttttctttcattcttttttgatctgtgttttgatcggttgtccttgatgtgggtttgttttttttttttcatattgtttttactggggggagggtgtggggacagggatagaatgagagtccagactgggttgttttgggtttttttgtttttttcttttttcttcctttcttcatttctttttttttttttaatggaaacacctaatttgtaagaaaacaaaattcacttctgtacagaaatgtaagagtttataggaataatcactgaacagtagttttcccggtaatcctatgttgaggaagaatggcacagtggcaagggcatcagtcctgtggccaggcagacccacactcaagttctgccaccccttaatttccgagcattgcactctatctctctaagttttagctttgtctgtagaatgggacctaccccaacagggttatagtgagtgtgaaatgttatcatgcctataaagtgcccagaaatagtttctcaacaaataagtgtttttgtacaaatatcctatgtagctattcattcctataagaaaggtaaattttcgtctgtgattgcactgtgggtcagtggtgaaactcaaataatatcaccgaacagaatagaatccagaaacagattcacccacagtcaacaaaggcctcactgaagttcactgagaaaaggatggtttttctcataaatggtgctggaccaatttaatgtccatagtggggaaaacatgacctgggaatcctaactcacaccattcagaaatgtcaattctagttgaatttatagacctcagtgtgaatggtaaaacaaaagagcttctagaagaatcacagatgactttggttattatcttggattgggcaagcgtttcttaaggcacacaaaggctaacttaaaaacactaactgtaagagaaagactttgaaacgatgtttgcgttacatatatctgacagaggataaggacttctacaaaacaacaaggaaaagaaacaattcagtttttaaaaatgactcaagacttgcatgccacttcacaagagaagaaatccaaatggttagtaagcatatggaatgaattcagcatcagtagtcatcagggaaatgcaaatttaatccacaacaagtaaccactagaccccaccagaatggctaatttaaaagccccaacaatactcagtgatggcaaggatatgaagcagcctgaactaatacatgatggtgggatgtaaataggaagaattgctttggaaagctttttggttgggaatgtctgctaacattaaacatacagctatcctgtgaatcagcagttccactctagtatatccccaaagagaaatgcagatacatgtttattagaagaggagtcctcatcccctcagccgcagacctggtactgggcagcacagctggaggtgagcaagcatcaatcaccacctgagctccgtctccggtgagatcagcaggaggtgagtgagcatcagtcaccacctgagctccgtctcccgtcagatcagtggcggcattagattctcataggagcgtgaaccctattgtgagctgcacatgtgagggatctaggttgcatgctccttatgagaatctagctaatgcctgatgatttgaggtggaacagtttcatctgaaaccacacacccccatccgtcctggaaaaattgtcttccatgaaacaagtccctggtgccaaaaaggttggggactgctgcattaggagacacgtgcaagaatgctcacagcagccttattcttcagagccccaaagtagaaataacccagatgtgcagtagtggaataggtagttaaattgtggtgtgttcatgtcatggaataccatacggcagtaaagaggagtgaactgctatgtgtaacacatggatgaatctcactagcatgatactgagtgaaagaagccagattcaaaaagaccatgtactgtacagttcatctacctgaagttcaggaacaggcaggattcatctatggtaatagaagtcagaataatagttacgtggggtagaagggtagggattggcaggggaggaggatgctggacatgttttcagtcttcctgtggtggggagtcacatggaagtacacgtgaaagaacttacctaagatgagcagtgcaggtaggacattctgctgcactcgtattaaaattgtttaaatcatttattgagtgcttttggtatgccaaatcctgtgctacattttcagaacagttctctttgggtttttctgttttgttttcacttttttcctttccctccctccctccctccttccctgccttccttccttcctttttcatggtgtcactggaagagtcctctttgttggaaaaaattgtttccattttacaagtgagaaaactaaagctcttgagagttaaagtagctggtccaagctctcctggcttgtgatgggaccagggtgtaaacccagctttctctcactccaaggctttggtcctaattcagacgtttaaactccacacaggtccttcatccatgtaaaggatgaatgtcagtgtttctttccattgtaattccttgagggacaggtgactatacatctgtgttggatacaaaatctttcattaatcctactgagcatctagcacgtagtaaccactcaataaaattcactgtctggccaggcgcggtggctcctgcctgtaatcctagcactttgggaggctgaggtgtgtgcatcacttgaggtcaggagtttgagaccagcctagtcaacatggtgaaactgtctctcctaaaaatacaaaaaaaaaattcgctaggcgtggtggcacgcacccttagtcccagctactcgggaggctgaggcaggagaatcgcttgaacctgcaaggcgcaggttgtagtgagctgagattgtgtcattggcacgccagcctgggtgttgcagcaagactctatctaaaaaataaaaataaataaataaaaattcactgccctattttgatcttagatcataatcaggagaaagtgctgagcactgagatagtagctccttgggaaacagatacctctcccgtttcctctctttcctccttttagacttcggtcatgtatgtcttcctctcagagttctttctagatcccttcagtgagctgagtgcctccatttggcgtgttatagttgggttgggtggctgtgcctctccctgaacatgacacaccagaatacccagatatgtaacctttcccccaaggaaagtttatcccaggtgggaactatgtcatcttgttcctgtaccctgagtgcattcccaacattggaccctgtgaacccaggggactgtttccaaaatgtgctccaaagcatattttgtctatagtatcttaataggtaatatacgggagaagccttcttttaataaaatgtgagaaagcctgtgtgaagcagatgttctggcttgcagaacctcgtggagtctttattagtcacatgtgcattttggagcttccatttgggaaattctgaactgtagtgccacatctttgggaatgcaggaatcttagaataaatgtaggaacatgttctgttctgtactcttcttggtggagaatctagcgtggtatcaggcctgccaaacagcagccggaaggaggctcctcagggaagtgtcttaaacacctcgagatggcgcagctggctaggctcggtgtggtttgtaaaagatagcaatgaatttccatgccaggagcgcctgctctgtgttcacaaagcagtgtgtgtctgctttaatatctcattttggccatcctgacgtttgtttgatgcagtgaatgactaggacatcttcctgccaaagccagcctttcttcctctggaggggcggcctctcttccgctgatttctacattctcaggattaaacagcttataagcactatgtgttaattgttcagttattgaaaacccattagtgctgttttgcttttaagagagaatctttttggtatggcttcccattgatttaacttttttttttttttttttttttttaagacagagtctcactttgtcgcccaggctggagtgcaatggcgcgatctctgctcactgcaacctgcgcctcctgagttcaagtgattcttgtgcttcaccctctctagtagcgggaattacaggcccatgccacgacgcctggctaatttttgtattttcagtagagacggggtttcaccacgttggccagactggtcttgaactcctgacctcaagtgatccccctgccttggcctcccaaagtgctgggattacaggcgtgagccaccctgcccagccttaatttttttttttttaagttgtatagtaattctcccaccctcagctagtgtgatttatctgcgtaaaccagatcaatgaagacaaacaagtgcacacacagaaggtgatttcacaggtgagcagaggcctcccagggccctgtatgagtgaagggagctgattgccgggtgcaggactgtgagatgaattggtgatgctcccagcccagaccagtaagagcagcccaccgccaccaactgcctccactacacagatgcaggagtcaccattcaaacagactcatccctagtgaaagagtgagggggacctgctttagccagctctcctagtaccttagcaacgggctcccagggtgagaagctggaagttggagaaagacatgctggaatgcataagctttcagaaaagagacttcctttcctcgctcaggtatcttggcaggtagtcaaactgttttaaaatgagactgtacaagtaaatattccaagttgtgctccttcaggttttgtctactcagcttttggttttgtgcctctcattttcttacacctccagaatcacagaggctagaagctaaagctgtgtcagcacactgggagttttacagtgtacggattggcagacagcctggcttctttccagggcattaacagttatgcacttgtgtgtctttagagccatggtcactgcgtccctctctctgcctcaggcctctgtgttcctgcaggccagtgccttgcgtttgtcctgccaagcctggttgctcagctctccctggctctcaggagtcaaagcgcatctggttctgcttgtctggtttacctgtgttaaaagcaagactctgcatgcttattctcacatcagtcagaagacgccagcctgttgtttttcagagcgaggttctcagtgtgagccatgtgggcggtcctttttggtttgaaggtgaccaccctcgctttcagcggaccggggcagggatcagggatcaacagcctggggcagggatcagggatcagggggcagggatcatcacgcaggaagctgtgtgaaagaggtgtgggaagctgcttccctggacttgctctcggttacttcagctgcctgtctgctgcgttttcccaagcgtgcttctcagtggttgctgttaatgttctaagggccaccatgtaacatttatttgaaaacagaaacaaaactgtatgtggacactgattgcctgttcctaaggacctgctccttagagccaagccccgtgactgatgcaggctgatggcagcatcctggggcctgaccttggtgcactgtgtctctggcttctttgcatgcctaaaacttgcgtagtctgacacgtagggaaaacatgagaaatccatgcctaaataatttcaccttaatcgtcactattctagaccagttgtaagcttactagcttaagaaagtattttaaatttagaagctacatgcaatacttgtttttcaaaattgtttactcaaacagtacatttaacagagtagccatcctgcattcctcctggtttctctgtagtatgaagaatagaatagaaaatagaatagaatagaatagaatagaatagaatagaatagaatagaatagaatagaataggcttttataattcttaactttgtattttagaaattttgtatctgatgtataagatcagatcataagcctaaagtagcctaaagtatcagctcaaaatccacatgcctgatggtttccttcaaatgctgcctctgtgggtaggaagcacactctgattccactgagcctgtctctgcacggaacgaacacaaagttcggtagtcacaggacacccttgccgtgctgcataatgatgtctcactctgtccccaggtggctttaccaagccacatcactgacgtattcattgtagttgactcagaaccactagggcacttctgtgatcacagcagtcccatgcaggaagctttaccttcaggaaagctgctggattgagactggagggaagtgtgactgcctgtgcatgaagtgctgagatgagttcttggcctgtggtctgtgcttgtatacattattattatcatttaatgtatgtattttcttatgaagttaattatttgccaatttttctttttgcattagattaattaaaaacagcagtgacttttggatacgttgagaaagttaatacctttttaaattgcgaaacttaaataccattgccacacagattatatattttgtgagacacttgagagactgggtagccaaagtttggcataaaggaacatgttccagtaaccctgataattgtcaggatttttgtctaaaaagaccttagtcacatttagcagtgaccaagggcctggtcaaaacgtgagtgtgtcacagccattcagcactgttggactgtaactcctgggctgttttattttgagatgatcatttctatcaggatcaggaagtgttctattctctgtaccagttattctaggaccaatacattaaaaagcaaaaacgtattgggcctgttggattctgtgaagggttcttcgaaggaaaatctctaatgggacttataagcaggcactcatttccttatccaggaaatgaaaaggccgtgtgctacggtgggaccaccaacctaaggaagatgcaagctctgatcaccgtctagttggagaaacaggccattgtgataatacaggacagaacgctaaggggtggtagaagaaaggatggcctactcagaggctctgacccaacctgcacatctctcatttgtgtttcttctaatgataagtgacttggactctgagcaacttggagggaattcagaggtctgcttttctgcctggagttgactgcttcttatggagtgagatggggtggctggaggaaaagggaagcctctggctgctttgggctttctgatccttgtggttttgtagatccacattatcccttcattggagaaagtataaaaataaagctaacttttagatgtgctcaccttttcaactcttaccattctttagtcttaaaatcttcattgaggtcaagagaaaagatgttggaccccgtggccgcaggcattgccagggtggtttgcttaccccggccatcccaacaatggtggttggtttttgtgagctgccgggaaagtcgtcttggggaatggacagaccttttcttcagggttaactgagcacagccgaaaacaggccctgtgctgtgaaagagcctcagtggtggacagaagccagggaaaagcacgaatagaaatggttcgagtttctatgagaaggacccagccttgcctttaagatttttcacctgaatatgacgagacttaacttttacaagagagtcttgccttcgtctttggaaaatgacctaactttaacattctccaagaagctcagagaatgatgactctgtcagattcagatagagatgtgcactttctgactgaagataggaaaagcctgtagaaaagtcaaaatattttcccagttttttgagagaagccaaagtgtatcagaatcaaaactacttcctttgtgtttctctcctaaagcacttgtagaaacgagtacaattaccaggcatagtggctcacgcctcccagctattcaggaggctgaggcaggaggatcgcttgagcctgggagtttgagagcagcctgggcaacttagtgagacccgtctctttaaaaaaaaaaaaaaaaaaaacgaacctagcacagtttcctccaggcataattaggaagcaccaggaaatcctaatgggttttcaagaagaaaatgatgattgtgaaagaccccaacctcctctccctgctaggtttctgatgcagaaaaagcaagtcaggcatctgagctgggaaggcactgcacatcatggtgacatttgtgagtctatatccaggataaaaattatttgttcagttatatgtgttgaaatagtctctctcatccatcttagtacctcatggtgtcttatttcattgaggtataacttacatatagtaaactgcaagttttaagtatacatcttgacatttaggggctgtatttcttggtgctgtctacctgatgcaacctgtgaactgcatttggcagatccccctcacacttcaggtctcacttcagtcatcctagtttttttaaaacttcttgtttttattttgaaatgtaacgtgcatactgaaaagtgaagccaatatatatgtatacacttggcaaataattataaagcagacatccacataccaacactcaggtcgagaggcaaaaacactgccagccttccctgaggaatccatctagtcctccgctggcctgaccagcaccaggccttccctgctcttccccatcatcagctccagagtgtgtctaaaccatgtctggtagattggccgtctttgaagttcatataaacggaatcatagcctgcattcttttgtttcctgtcattcaaaatcatgactctgagattcaccaaaattgtgtttggtctattttatagcatttcattgcaagaaattttaacatttttgcattctactgttggtggatatttgtcatatttccactttggggctattacagttattgttgtgagcatcttggtacatacagtgcatgtgtcctgctacacatatgtgtgggtgtttttctaggcatgggatttctgggcttcagggcatgtatatctttatcttagatgatgccaaactcttcagagtagtggtacctgttttccatcagcagtatatgaaagctcctttcactctgccttcttgccaacacttgatgcagtcagacctcgtaatatttgccattctgaggaatataatatgttgtgattttatttgaatttctccaatttttttttttttttttttttttttgagatggagtcttgctctgtcacccaggctggagtgcagtggcacgatctcggctcactgcaacctccatctcctgggttcaagtgattctcctgcctgagccccatgagtagctgggattacaggtgcccgccaccacacctggctaatttttgtagagatggggtttcatcatgttggtcaggttggtcttgaactcctgacctcaggtgatccgtctgccttggcctcccaaagtgttgggattacagatgtgagccacggtgcccagctgaatttctctaatattaataaacacagttctgtgatttttggctatttggatttcttgtgtcatgaagagtttgttcagattttttgcccatagttaggtgttttaaaaactgatttttaagaacttttttctatatccaggataaaaattatttgttcagttgtatgtgttgaaatagtctttcccatccatctttgttcttactttcctcatggtgtcttattatttcattgaggtataacttaaatagagtaaactgcaaaatttttaagtatacatcttgacataagtacagatgtatgtacgcatcacccagatggaaatacagaacatgcccatctccctaggcggcttcttgagtgtcccgtctccctcactgccaatccccagatgtaacttctgttctgacttctatgatgttttaatgaataaaaattcccaattttaatgtaaaatttatcagtctttccttctatgtttagtgatttttgtgtctctgaggtctgaggtcataaaagtatgctaaaggctttacagttttgccttctatctggatttgtaatctatcagaattgtaattatttatgatgtacagtagggattctgtctttttttaatttcccctgcgattatgcagttgtttccgtttcagtatttaaaaaccttcatttcacccttggctctgcaggaccgccttgtcataaatcattgtcctacaggcatgattctgtttcctgtgctgtattctctgtccctggcctgatactatactcttgtaatcatcgtgactttatgatcttggtatccggtagggccaattttgaatgttaaccaacttttcatatattatccttcttatatgttgctggattcagtcagttgctgtatcattatgttcatggatttattcggcaggtgtttattgagtagctggcatgttatgtgctgcacactgttctagctgccagggatacaatggttgatcaaaaaagagacactgtgtgctcccatgaaggtttcagtatggtaggtgggcacaccccctgctaggcttgggggcaggcactcaggtcacctgggagactctgtgccctcagcatcttgtgacgtgcccttgctgggtctgtcgcttgtacttttttgtgagctccttgagagcaaagcacatcatgtttacttcttcgttttttgtttgtttgtttgttttggtagtccctggcacatggtggtacagtgggtatgcagtaagttctggagcagggacttaccttcctaccttcctttgccttccccacgctcttacctgctgagtgtagtcagcccgtcctgttttcccttccggcactctggccaccctcttctaatatcccacactgcccctgcagctcacagagacctgcacatactgttcctctcactggagttctcccctttctacatttggccaactcctactcacctttgagtttgatttaaatattatttatttaagataagtctttcatgatcccaactcaaatttaaggccccctttttattgtttcaccttatcctgtaatttaacattgtagcttttatagtactttgtaattatgtgtttatttctctgcatctaactctcctcaaggcactaaattgatatttagagtaaacataggcaccatctctgctgtgtcccccttccatagtgattgtctttactttccatcccttagttgaaaattggtaaagggaaaatgaggaaactctaagaatcgtgtcatatttaatgaaatcttcaagtggcatcagatgctagttgggaacaatgacttacaaagtgcagtaaacacatcacatatccatgggtatatggtggcagctagaaaacaaatttgtattgataactgaattgatagaggtttttatctatggaccgaggtgatgtgatctagctttttctgtgatacccagaatctataacctgtctttgttgacctcaagataaagaccttgtaacaacaacagtaataacagatttgtgtgggagagggttcagggaaattcatgggtaggaggtcccaggaatctcctagacaacatttgtactgaatctgatgtaactgttttggtacgctgaagtccactgaagtcttgcaatgtccacaagaaggcttgaatggtaaagtggagttaacttctgtcaatttcagctctagctcagtagcagctattcctcctccatccccagtcctatggcagacagctgctgtacactgttcctagagcatcttgcaagcagcttgtgggagccaggtagggtgggccaaaaagaccctgacatgcaaatatctggggtcagtgctctgattactgatttcagcttttgatcacagaggtacagacaaaggagtggagaccattattgttgcatctgcccccattgttgtaagtccttccacctctggctgaagtggctttctgggtatttaaaaggccagcaccctttttccctcttccctttatttttcttttgcatcttttgggaaccaggcattaaatactaggacattgaaaaataactgtatatacagggaaaattagaaagtcaccgtagattcccagggaatagcataggctcggagaagacctgagaagatcttaaatttacacctcaggcttatccttggcacagagacagcctgcaacaatccagaaataataataataatgaacagtaacaaaagtagcaaacactttgtcttagaatctgaattctagagttaccacattattagagtcagatgtcccatttaaaaaacaatcataaggcatacataagaaacaggaaagtaggcccattcaagggggaaaaaatgaaacaaacagaaaccattcttggattcatctactatattttaaaacaagggtcttactgaagatgctcaaggaactaaaggaacgtgtggaaaatcaataaaacaatatatggacaagcccaggtgcagtggctgacaccagtaatcccagcacctaccagggcagatggcttgagctcaggagtttgagaccagcctggtaacatggcaaaaccccatctctacaaaaattagccccaggcgtggtggtgtgcacctgtagtcccagctacttgggaggctgaggtgggaggatgtcttgagcccaggaggtggaggttgcaatgagctgagattgtgccactgtgctgtagcctggggaacagagccaggccctgtctctaaatcaaaacaaaacaaaaagcccaatatggacaaaatgaaatgtcagcaaagagatagaagacctgaagataaatcaaagagaaattctggagctgaaagtacaatacctgaaataaatttactagaaggattcgaagacagatttgagcagggagaaggaagctaggacaatggaaaatattaagtccaacaagcagaaagaaaaaaggttgtagaaaagtgaacagagcctaagggatatgtggaacaccatcaagccaaccaacatacgcattgtgggaaacaaggaaaaagagaaaagggcagagagaatatctgaagaaataaggactgaaaattttccacatttgatggaagtcacgaatatatacaaccaggaaactcggtgagctccaagttaagatgaactcaaggagacatattatagtcagagttttgaaagacagagataaagagaatcttaaaagcagcaaggaagaagcagcccatcacatgcaagagataatccataggattaccagcagttttcttattagaaactttggaggccagaaggcagtgggccaaaatgttcaaagtgcaaaaagaaaaaactgtcaactaagaatcgtttgtctgtccaaactgtccttcaaacatgagggataaattaaggcattcacagacgaacaaaagctgatggagtttgttaccactagacctgccttgtaagaaatgctcaaggtaatcctgcaggatgaaatgagaagacaacagacagtaacttgatgctatatgaagaaataaagatctcaatagagataaattcatgagcaatatacaagctagtttataacttcacattttgttttctacatattttaagagactaatgtgtctgaaaggattactagtttatttttggggtacacagcatataaggttttaattttttttatgttaaccgaaaggagtaaacagagctttaaaggagcagcatttttggatgttactgaagtaaaactggcataaattagaattagagtattataactttcgaatgttaaatgtaatccccatggtaaccacacacacacacacacacacacacacacacacacacacacacggctatagaatatacacaaaaggaaatgaaaaaggaacttaaacatttcagtacaaaaaataaaaagaagacaataatgtaagaaataagttataagacatatgggaaacaaatagcaaaatgacataaataagcccttatcggtaattatttaaatgtaaatggatcaagctgtgtaatcaaaagacagagattaacagaatggataaaaacacttgatctaactgtactgtctacaagagattcagtttagatccaaagacacaaataggttgaaaataagaggatagaaaaagatagtataaggaagtggtaagagagagcagacgtgactaatatcagacaaaatgattttaaatcaaataaaggttgcaagagacaaagaagaacataatatattaaagtttcaatacagtaagaagatacaacagatataaacatttgcacagaccgataacaggccaaaatatatgaagcaaaaactgaaggaagaaatagttctacagtaatagttggaaacttcattaccctactctcaataatggatagaagaaccagacagaaggtaagtaaggaaacagaggacttaataaacaaactagatctaacagacatacacagaacactctatcctacaacaagagcatatacattcttctcaagtgcacagaagacattttccaggatagagtgtatattaggtaacaaattaagtttccatagatttttaaagatatcatacagagtatcttttctgactacaactggataatgttagatatcagaaatagaactaaaactggactattcacaaatttatggaaattaaaaaacatactgttaaccagtagatcaaagaagaaatcacaagggaaattagaaaatacttagaggtcagctgggtgcagtggctcatacctgtaatcccagcagtttgggaggccaaagtaggaggattgctggaggccaggagttcaggacctgcctgggcaacatggtgaagccccatctctattaaaaactttaaaaaagaaaaaaaaaagaagaaaaaaatatttagagacaaatgaaaatgaaaagacaacataacagaacttatgggacacagcaaaaataatgctaagggggaaattttatagctataaatgcttacattaaaaaataagaaagttcaaagaactagataaggacatagaaaaagtaaacccaaagctagcaaaaggaagataataaatattagggcagagataaaacaaactagagaatagaaaaataatagagaaaattatgaaaacagaagttgcttttttaaagatcaacaaaagttgaccaacttttagctaggtggactaaggtaaaaagactcaaattatcagaaatgaaagtggggacattactactgattctacagaaataaaaagggttgcaagagagcactgtgaacaattgtacaccatcagtttggataatgtaaatgaaatggacaaattcctagaaactcaaaacctattataaaatatggatagacctagttatagtaagtactatagtaagtactataagttactagttatagtaagacaattaaatcagcaatgaaaaatctcacaaagaaaagccctaaacctgatgccttcactggtgaattctagcaaacatttcaaggggaactaataccaatccttctcaaacttttccaaaaaaattgaggagaagagaacacttcctaactcattttatgaagccagcatttccctggtacaaaagctagacagagacactacaagaaaactaaagaccaacatcctttatgaacatgaatttaacagcatactaaaagaattacacaccatgaccaaatggaatttattcctggaatgcgggggtggttcaacatactgaaattgatcagtgtaatacaccacattaatagaatgaagggaaagaaacacatgatcaattcagttgatgcagaaaaagcatttgacaaaattcaacatctcttcatgataaaaaacactcaacaaactaggaatataatgaaactgcctcaacataataaaagccaggaaaacccaacaagtgaaaaatcaacagcaaacataactccacgatgaaagactgaaagctttttctctaagatcgggaacaaggcaaggacgtccactttcatcacttttattcaatatcttactagaagttctaaccaaaccaattaagcatgaaaaagaaaaggcatccaaattagaggaagaagtaaaattatcttttcacagattatatgatctatgggaaaccctaaagattccatccccctcatacacaaaaaccattaaaactcatgttttaatgaattcagtaaagtagaactatataaagtcaacacacaaaaatcagttgcattctatttactaatactgacggaatggaaattacaaaagcaattccttttataatagcatcaaaaataataaaatacttaggaattaacttactcaaggaggtgaaagacttgtaccatgaaaactataaaacattgctgaaagaaattaaaggagacataaacgggaacacatcgcatgttcatgtgttgaaaaacaatattgttaagatgtcagtactgctcagagcaattacagatttaatgcaagtcatgtcaatatcccaatgaaattttttgcagatatagaaaaacccattccaaacttcatatggaatcccaagggacattgaatagccaaaacaatgtataagaagaacagagctggaagactcacacttcctgattttgaaacttataataaagctacaataatcaaaacaatgtggtactgacatgaagacagacatctggactagtgggacagaatagagaatccagagataaatctccacaaatgtagtcaaatgattgctgaaaaggatgacaacaccattcagtggagaaagcgcagtcttttcaatagatggtgctaaggaaactagatatccaggtgcaaaagaatgaaactgaacccttacttaacgtcatatacaaaaattaactcaaagtggattaaatgtaagactcttagatgaaaatacagagcagaagcttcacatgacattggatttggcagttatttattggatgtgataccaaaggcacagacagcaaaaggaaaaatgataaattggactacatgaaaattttaaaatattttgcatcattcaacagagtgaaagaatcattcaacagagtgaaaatgtaatccacagaatgggagaatatatttgcaaattatttatttgataagggatagatatctagaatatatagagaattcataaaacttaacaataaaacaacctcattcaaaaatggacaaaagacttgagtacacatttctccagtaagatatacaaatggccaagaagcacatgaaaatatactcagcatcactaatcatgaggaaaatgcaaatcaaaaccacaatgagataccacctcacatccatgaggatagccactatacaaaacaagaaaaaaaaaaaaaacaagtcttggcatgaatgtggagaaatcagaactcccatgcattactgatgggaatgtaaaatggtgcagccattgtggaaaacggtttggcaagtccccaaaaagttaaagatagaattactatatatatgatttagcaattccacttctgggtatatacccgaaagaattgagagtagtgtctcaaagaagtatttgtacaccatgttcctagcagcattatgtgcagtagccaaaaggtagaagcaacccaggtgtccaccaaaggatgagtggataaacaaaatgtggcctctacatttactgaaatatgagtcagctttaaaaggaaggcagttctgacacacactacaacatggatgaaccctgaggaccttacacttagtgaaataagccagtcataccgtgtcagcttatttataagaggtacttagagtagtcaaaatcacagagacagaaagtagagtgcttgccagtggttgaggggagagaagaaagggaattactgtttaatggggactgagtttcagtttacaagacgagttgcggagatggatggtggtgatagacacacaacgttgtgaatgcgtttaacactaccaatgtgtactctttagtatagttaggatgcgaaattttatgttacgtgtaccttaccacagtaaaaaaaaaaaattttggagaaaaataaatgtaggcagcaactgtacctcagacttttcctgtatgtctcagatcctcatcaggggcctgagcacaaaatagttttctaattaatcattcttcagggtcaaaaaaaagcaaacagttctgtctgtttaacagtaatatctgacattgagtgcctcttttcatgccaggcattgtgatcttatttcatctttgcatccatcctatgaaacaatatttttatcttcattttatagaggagggaatttaggcaaatggttttataactggctagggccaccagctgttcggcagtggaacagcaatgcaatttgaacctcaactttctgcccacaaggcccaagaacataatcacttttctgtactatcgtttgacatattgagagatcattttgtctccccctcattggcgaaaggatgtgaagtcacgtgcctgatagaggagcgtggtggcctttaagcccacccagagcctgtgctggagctccactgtacccatggctctcaggtgcactgagtgtgttgtgcacatggcaaacacccccttccgtcacctgtacccaccacctgtccaagttcataggtggaacaactgccttggtaaagttgtgtaaattgcccaaagccgtgcggcttgtaaagtggcagagccagaattgaacccaagtctgtattattccaaaattttattctcaccattatggactcctgctcccttgttccactctccacgcagctgcccacaagagcttcttaatttttctacttcagctctttcgatgagttctcattgtgttagaatgcagtacagcaagctccttaccatagcctaagaatccctgaaggagctggccttgactgacctctgcttctttttatccactctccctcactcattcttcccagccatacaagtttttctcatcagtgttcctccatgtggaggcgctgtgtggcctgctcccatctgcaccctcctcctcagctctccaggggtctggcttcttttcatcctttgagtttcagctctgatgttaattcctcagagaggccttccctaactcccctctttccccaagttgtcctcttgtaattatgctctgtcacccctttcagactttgttttttggtttagggcctgcctctgcaagtgctagaatgtaaacgccccaagggcagggactggactatcctgttagctgttgtcttaccagtattgagcattttgccttcgtatttattaaatgaatgaatagatcatgattaaatttttgagagacattcagatgtaagattaacagtttgaatttttgttcatatctaaatcccttgctccaacgccagtctaaatatcaagaggtgtgttgttcatagaaaagaggaaaacagtgttaaagtattaagtttctgtaattcaatgaattttctccccaaaatgaaatattcagtacttcagaaattttttagagagatacgcgtcaagggagagttttagaactaagtgtcaccagcatgaccacttggcttttaaatagtctaaagtgttatagtgaatgttggagttatttatgtattatacctttctgctgaaggttgtcctgactttaaatggatatagtagtgctcttcccctgatgaggacaaattagaattagagatctccttgttgaaagaaatcaatcagactgcaggtaactcttgagtcacctattactgttagaagtgaaagcagacagcatgaaatgagaacctctctcctgtgctgactttgcagcatcatagagtccttgggaagcgcacgcatctggtatctgtccctgttcaccctgcaagccctccccacccttgaccaccgacttcctgggagctgctgaaggcgtcgggggaggtggggtgaggaggcaggtcaggatggccatggtaactaatgccattggagcaagtgctaccagatgcccagacactggtgtgtacagcataagagcgctccttgactcctcagggcctgctgggtcttgtctgttctaaatcgccagaagctccaccctgttcatgttcttcatttaatcctttctaacttagaactatttttgatccttggctgtacttcattaattttgaaatatcaacagtgctagacgaacactaatgtcttataacttaggtgggtttactttttctgctccaaatttttatttcactttgaattgttagcttattagctagttctaaaggtattttgcagagatagttactctgactggtatctgcaagtttatcacttgggatttctttgaagagaaagggatgtatttcatgtatcacaaaacctaccgttccttgtactggtttgtaggcatagctcagaaacgtgcagtcatagcaacccggaagaagaactgctctgccctccagaggtctctctggatggactggtcgcgagagcacacttagcagcgatacggcatcgcgatcaggggagcggatgccagagcctgactgcctacttccaaatccaccttgaacacatccagttgcgggaccttggccatgttcgcctctgtgtctaagttttctcatcagtagaatgaggatagtaacgaacatctaccgcatagagagtttgtgaggattgaatgctttcacacttagaacagcccctggcacatcctgtgtcctggaatgtgacaactgatgctgttacctttattagttttactcgtgttactattttatgaaggtaaactgacaatctcattttcagtcttggcttatgtgagagacacttaattgtacaaagctttgcttgcattgagagtggcagtgtgttccaggaacagaaattcagtggggccagcttattatctggccactgatcccaaagatcaccaggtacttggtaaacagcctctttacctggcaggtgaggcctgacacttccccggtttctactgggtttccattgactcccattcataaatcccctatcgttaggacctcccctgccaccatctgggcagtgaagctctgccggtgtgctactggcagtgtcccgggttgtgtgtggagacactgagcactgttgtttactttagaagtttattgtccccagaatgctgctcccccacaactgtctcctgcagcatgaaggctgacattgtatcgtggctgtgtatccacatgcatttattaaatcacacctccctttcagcccagatctgacagaactctgggagctaccgcctcataagtagatcaaatccaggcaccaatgggcaaatattttaaacactcatactgtagccaggagctacaaggaccagtaagataggagtctgagcacatggtgagcacacattctctggagtcagagctcgtgcaccgtggcctgaatgtctgcggtgtgcatgggtgtgccaggcactctgctaaccatgctgcatacagtggctccttccgagtctcagatgtgacattggagtgctgccccaaatccaactggaactacttcatggccccaaaaccctttcgtgtggtttaagttagaagtggtattggttgtttctgaccctgaaacctgtgtgtgatggggctgccagactgtgactgcttcgtaccacgctttgctttgaagtggtcagtaaaatgattccagagcatgtcatgtacaaaattagtttcattgccacaggatccttcaccgccaaaaccccgtgaatgtgaggtacctgtgagcgcggccctccatcggccacagaagcttttggagtgggcagggcacaggtcatcttcccatgacttcactgccagatggacgggctcatgggtcctgctttgcctggcgtgggctcatgggtcctgctttgcctggcgcgggcgcttgagctttcacatctgggactggtgagggatggagagtacacgcccagcaaggcctggacagcgcactggtgccacagcccttcgctcgggcccacggggtgcagtggaggaagtgtgagccttgtacagagagaggtttcaggcttcagagaggaggcctgtgaagtcaggaacatctcccctctccctttgcaatttatggaaagtacattgtgccaagcaaggacagtgaatgggccttcgtttcagcatctttaataaagtactgatttgggttatgcacagatataaaatctctagtggacagaggtgtgaaatgtagttctgtcaaactcagcagtgttttatggggcctatgtaccacttcccttacggcctagaagccgattagcagcctcagctttcagtgcaggggtgttgctgagatggctttttccctccggaaagactgaaactgctctttcttatagtgtgtattaaatgcaaatcttactctatattcttcagattgtaacctataatttccaaatctgacaattatttctctgccttcttttagtattttttttaacactttcagtattagcaattagccattaattggtaaattggagggtatacatactcatgattttagcttttatttttaaatgctattaaggcataacaggctacgaaacatagaacagtacatacagcattgcatggaaacctttgaagcacagatgttctgtcgtattaaaatataaaaactcagagggaaattagataccagatagaccaacaatttagggaaggaagagggagccaaaatgggtggtttgtggtgggtattgaacacatagtttccagcgtcatgcagggagaccctgtgtagaatctgcaccataaattagacttgtactttaattttctgaatgagaagagtatgcagtgggaccactgacataaatgagagttgagaacaaaagatcatcatagcagatgaaggtggaagtaaagtgaactttagaaagcaatgaaaatatctcttgacattcgagtttattctgaaaaacttgtgaccccttgcaaaagtaaggggatcttcagatgtcctgtcccaggacctccatcttgcctggccccctccctgtctcctgcctcctgccttgctctccagcaccctgcgagcgggagctcttctttttggaggtggtcccaacaggtagcacaagtcccatgaaactccaggaagcccagggctccctgggcagcactttgggaagtgtcttttttcctctcagtaagaaagttcttagagaacagggccaaggtcaatgaggactcccccctggggatgcactggggtgagatggggtgaggaggttgccttttcagggccacactcttggcatgttttcttctttggctgacagaaattggcatattttaaagtattttggtttgtgcaatataacgcattttgagagcaatttttaaactgaactactactttgcactctaaaaaactctacattttaccatggtccgagaagatatttgtttagatgtgacaagggatttgtgaagcatcttcatctaggaaaacctttttctaacagggcagataattacacaggtttgtagaagcctgggtggaggaggcttgcccgtgctgaccatgctatgtgcaggccccctctgggagaggttctaattgtgcgcccctccctgctccacagcgtactttggaaagccctgcagcacacaaatcccttgccttcatgggtttgttatctaaaaagagttttaaaatatatgtcctggatgcgaaaacaatgcagatattacatataatatatgtatctgttatacagatattataaataaagtccatatatatcagaacattatgaaaagtcttttaacacatttaaatcattttaatttacataatgcatattttttcagtgccagtactttttaaggttggtttgtttatttacttatttttgagacagagtcttgctctgtcgcccaggctgcagtgcagtggcgcaatctcggctcactgcagcctctgcctcccgggtttaagcgatttctcctgcctcagcctcccgagtagctgggactgcaggcggctcaccagcacgcccagctgatttttttgtatatttagtagagatggggttttaccatgttggccaggctggtctcatactcctgacctcgtgatccgcctgcctcagcctcccaaagtgttgggattacaggcgtgagccactatgcccggcctatttatttattaattcaacaaatatccattagtgcttcccatgttctaggccggaagttggcacaccttttctgtgaagggccacatagtaaatattttggctttgtaggccttgctgtctcttggcagctcctccaccctgcccttgcagtgtgacagcagccgccaacacaggcaagtgatgggcatggctgtgtgccgtagaaccttgtttacggatacggacatttgaatttcaaattttcatgtgccagaaatcagtattctttagatttttttccaatcatctaaatatattaaaactgtttttagtttgctgtcataaaaagcacaggccatcatttgctgacccctgttcttagcagtcttctaaacaccgacagagcagtgaccagaacagagttcctgtcgccctggagtctacatttaatgatgtagaggactttaagtagcactgattttgatagctggaagaatagtttagcttgatgcaatctgtctcatcagacaattccagttttaacatttcagcttacctgactgtactttaaaagtgagcttggcacatcaatctgctggttattaatacccttactgtggattgtttttctgtatcatgctgtttcccagcctttggtcttctcccctgctaatatcttatcaccttgctggtacaaggccacccagtttagtgttaggccctgtgttgaaccagctgaggcccagtgcagtgctgcctcggccattgagcagtacaaggtgctttactgacgctgtggtcttggtggcctgggtcaagaccccagagccccctgctgaagagctggccagcactatcaagtcccgctctagtgctgattgcagggttctttcaaggcagttttgcaacaaacaggctcatgccttctatttgtagtagctatggaaacgttagaagctctctttctaaagctaagcatacaataaagcacttcagatgttggtgggattagagactttagaagatgtttaattttctcccctactctttctttctctctgtccctttagagagggaacaagagggcaatgtgaatattaactgagacttgctttaatctctctcgtgacacttcagactgtctaggtctgcacaggctgcactctaacaaggagtggcatgcatattcatgacccagggctgtggaccagacacgcttcctagggctatattttacagtgtttttattttctactcaaatttcttgaaagaaacaactatgaaaaattgattttgtgattatgattaagtctagaacccaagacagcagtgctaaaatgttctcactggaaataggaacagattagaggaggtttgtgtagtatttgatttacagatagacaacacaaaccccaaaatgttggtgctcacttagagggggcagtggagcaaacttcacatctgcctaagaagaatgcataagggttctaccttcgtgaagtcctccttaaaccggaaggaaagatgaatttcacttaaaatatgtaagagtattaaatgtatatttaaatgaaaagtgtggaggtttactattattggcttggttgttatttctgattctcaaggccgtgaaagggagttgactccagagtggtcttgtggccttatttcttgtcagccttccacacttccttgacttacatctttttgcactttggatactaattttggaagaagacaaaaatgccttttctgctttgggcttcagtgtttcttctattaggttgtcaggtccgtggctgcgccaagaacctgctccgtgtgaaatacttgactatcatattttgttcctgaagtagtatgcctgaagcctggggctgcagggggctgagcaggacccatcaccccagctgcaaccagtgtccctgtttgagggagacacctggcagcccttcatctccgagagggcttttcttcagtctcattctttctgtgctccacttgccgtatatataaagcgggcattgtgtaagtttgcattctacagaaattagctaccaaacacttgaagggtgagttgctattaaaataccgtggtaacagtattttcacaaaacgtgatagaaatgttgccctccaaccccaagatgaacatgatgaaaatccactctttgatcccatccacatgggaattctggtgttttgttgtcatggaccttttatttatgcagtccagcctccttgcctgggttgcatttatatcggtttactttcatctaatctctcaaaccctaaaaagccctgggtcgggaaaccacaccaacaacaggaggcaaaaacacagcctgtgggtcgctgcagtgccgccatggccccacccacgtggtgaatgagagatagcatgcttacatttgttcatttagcaaacatttcccagcaccacgctagggacagagcacagagaagtgagtactattggtcttgttgtgaggagttcacagtgcattagagtatacagaaatacaaacaaacagtcatagcttacataatttcaataaggccagacacggtggctgtagtcccagctattcgggaggctgaggcaagaggatcacttgagcctaggctttcaagacacaatttcaataaatatgtattgaacatccactttgtgctgggaacgagactcggtgctaggatatcgaagtcaattagatggggctcctgccctcgaggaactcacagactcataagcagatgagtacaatgcagtgtgatgagaactgttaaaaaagagagagagaatgcattggaaacagacagcaggtgcacctaatctaagcaggtgccgaggggtagctaagacagggaaggcttccgggagactgtgatacttgctgagtctcgaaggctaagtgtgccccatgagaaaggaagcagcagtgagggaagcacatcccaggtcagggattcgtgtgtgcagagacagaggggaggccagcgttgcaacattgtcagaggctgagagatgagggcgcctggcaggagaggtgggtaggggccgtctggcagggtctcacgtgccctggagtggagcagtttgatagtccctttcctccagagacatcctgcgtttgctgctggcagtgacggtgctggcaccagactcttcagtttctgagccaaccacccctctgatctcaggagctctgaatgcattattgggaatttcagctttcctactttaattatatttaagtgaataaccaggacgtttcagaaaggagtgttatgcttctttcatttaccattagagagttatactcatgaacaaaaattccccagtcttacatttcttgctccttgagtcagttcttttcataatcactgactcctccttttcctacaaaaggtgagaaaatgagtttgtgtatcgacagtgacatcctgggtgtgaaactcaaataattcattgttgagaagttgacggatatgttggaagtgcttgataccggggctcgttatctttattctctatactggcacaaagtgggggttcagtgatcatggaaaagaggcggatattcaaatttaggtttaatgcctttgaatatttgaatagattctgtctccagaaaggaaatgcagccatataaaggacctggactttgtcacgagagaatgacagataaatgacacaataagaactttttccccaccatagacagatgactgattatagaaccagcattagctgggcactgacagtccttttctctgccatctggaaaaggtcagtcatttatacccaccagtggttttgatgctaaacctccaaagaccagcaggtcattcactcagcacatgttggttggtcctttgctttgtgccaggctccatgttgaggcccaaggccccaggaacacacgaccacagctgtggaggagctgggagacacaggccaggagcttaagtgctgtgagtagggaagcagagaggaccctgggccagctcacccggtgtgtattggagggactaagatggagcaacctttttaaagccccaaaaacacttcctgagcatacagctgactgtgtttagtacgtttcagttgtctgacttaattggacagtcatttttactattttcttttgaggctgttgaattagggagagaaactgttggactcattttctttcccaaatactacaggaaagagcaccagctttgtgaatgttgaagttttctctgtgttctcatgccatgttgggggagctagaaatgtctcagaactggtccacagcgttgcacaggggtgttcaggacaagatcagaagacttggctctttagctctagggtttgataccttgtggggacactgactccctggttctggcattggcagtgcccgagtgggaagcatctgataatcatcaggggacaggacttgtttgtcttgctgcctttatctgctcgtgggcagggaggtctctttctttggataggtatttgttctaccctaggttctttgttgttctccctggatcagggtgccaggcccagtagggacacagcctctcttggcagtctcttacatatgtccctggatccaaccactgaagactggtccctgcagtagtttttgtacagtcctttatagaactacatataatagcttaatgtttgcatgaggtttacatggctcttggtgattaaatcaaatgccctactcagtgatgtggcgatgctatcccagtcttcgtaggttgtctctggtctcctgccaagcggaacgtgccaggtgaacacttgggcacagtgagccccgatgctttcaggagcctgagtattcaaactaaacacagcaaatccttcaaagcccttccagcttcatctttagaatactgaatgcgggaaattccacagtgactcctaggaaacaattcttatttctaactgggctcccattaaaacaagatgattttcctgattctaacctgacgtctttgtgactgattctttagtgctcttcttattctttccctagtgagtcagtaacataattattcaacaaaggaatgtgtgtgtgtgcacgcacacacgtttgcctgtgtgtgtgttcttgggttcataaacttcagtttgagctactctaagtctttgcttccttgttcattcattcaacaaatactgagtaaatctctctgggtgcccgtggctggacatcacacacacatgctggatgtacatgtgcatatgcctgcgttgcctctttttaatgtgtttgcacttgagatgcatattcagagaatgcatcctcaagaaaacttgtggattgatactggatgttccgtgtttctgtgctcctctactccttttctgataattcttatgtgaagttatcaaacaggaaagtacgttgtcacattccttcactctggctccagttctgacccagtgggtgatatatgccatccgaaaccttaccgaagacaacagccaaaaccaagatttgattgcaaagatggaggaacaggggctggcagatgcatccctacttaaaaaagtgggttttgaagttgaaaagaaaggcgaaaagctgatcctgaaatctactagagacacccctaagccagtaagtaccctcgagggaactgtccttccctttggtttgtagaaagctgtttccacttccccattgcttcaagcacgaggctctttgtaagaatatggatgggagaattgtgccctctatagtggtttaccgaggaaagccctaaagatagctgcaaacggtttttttgttccggctttatgctgccattttcttaaaagagggacaatttcaaactcattctgggtgagaaatacaaaaggcatatcaaaagttatacatggtctaaaagtaagttactcataggaattagattttctttaaaagatagttaatgttcactatagtttaaaaaacagaactccttgaataatattgcatgaattgttttaggtttctctaagttatttgtcaccactgaccaaagttctgggttttttccccttttgtctgatgaatcttgtgaacagatttgctacatctgcaattttgtttctttcttcttctttagtgaatgaactacatccaaatacctgaatttttggaatctgtttcatggatttttcatcttctaccgtatgtgaaattgcaagtgtttgaagatttataagtacaaatttgggaacatacaaatcttttaggtagtagagtttaacgtgtataagctaaaagtgaaagtaactgagtgttctcttgtttctttgcattaatgtaactgtgtggtttgcctttgtccccctggatagaacgtgcatttaaagaatatattgtacttactgtgacagcagataataaaccagtctcttggagggcacaacccttatttgacaaaacttggatgttggcttgactgtgtttgtcccttcagatggcaagtcagcatcattctttatattcctcttctcattgggttttctgaactctggcaggcggttgaagtagtttctcactgtgattaattctagcaatctcttttcacccctctgcctttccaaaacattgacaagactcatttccagttaattaattcgagaaccctccctcttcattttgggtactgggctgtcttgtcactgagccctatccctttggaatgtggcagggagtgaggttggtgagagaacatgtgggcacttaactcttcatgttccagttcatcccagaagtagacatcccaggacccattctgtgtcaaggtgaatgcctgtgtcctccccagcttcatgcctctgtcatgggggaaggaatagcttatgttctgctctggtgcagtgccgtagattaaaggtacatttctatcttctttgatttaaaaagcaccagtctcataaaggtgccactcagttttagccatgtcttcactgaaattgcaaaagtacttttagggagcaggagtttatttgacatctagttatctgtctgtctgttcatctatctatctgtctgctgtatgagaggtaggactggattaaatgaccactgaactcactgaatccagatcattcatatcatcaacaaaagctctagggggaggtcacgttgtgaatgcttaaaacatattattttcttcaacaaccatatcgctaaactaatatatccagagattttgcacaattcgtgttgaaccttccaaaacaaaaataaagacctgtccaaaagttttgacaaaaatactgattgctcccaaataaagtgcttctaagctttgtgtagacatagtttaactgatttgtaaaaatagcttaagcatgttgagaatgaagtaaaagttttcccatgtgctgtctaatgt

SEQ ID NO: 21 - DNA, 24129 bp, Homo sapiens
cccaaccggccctggattccacttccgttccaccatcgctgctggagcagctgccttcaggccctgcgccgcctccggagtccatggccggcacgcgctgggtactcggggcgctgctccggggctgcggctgtaactgcagcagctgccggcgcaccggcgccgcctgcctgcccttctactccgccgctggctctatcccgtcgggcgtctcgggccgccgccgcctgctgctgctgctcggggccgccgcggccgctgcctcccagacgcgtggcctccagaccgggcctgtgcctcccgggaggctggcggggcctcccgctgtggccacctctgccgcggccgcggccgccgcgtcctactctgccctccgtgcctctctgctgccgcagtcgctggcggcggcggccgccgtcccgacgcgcagctacagccaggtacgtgggcgccgtgagggacctggcgcgagatccctcccgggccgcgtgcacgcgcccccgcgcccctccgtccctccgtgtgcgcctcgcgggcacgcccggggatccgcgacactcgccgcacacccgcccccgtccaccctgtgctcctattgggccctggaacaagggaagctctcccaggcgtcgggtcttctgcttgttttgttctcgcctcgagtctctggtcggttgggcagtgtaagtgtggctggggtgaatgttgaggccttgttccccgcctggcccatggtaggtttcgtgaggctgctgacgcccccacctcgcatcttcttgctttccgccggctggttgtgaagttgcgaggcccgagcccgccggagggttgggagtttccgtgcagcccgagcgctaggcctgggcggccctcggcgcctctcggtcggccgctgctgggaaggtgcgcgcacacagttgcgtgggctggcttgtagggaaggagcctgtccccatcgcgccgttccctctcctgtccccagggaaagacgagctgtcccggtttactgaaggtcacctctgcaactccactcatacagaaggtctttaaggactgtgtgtcgcctcgtctgggaaagcagtttggagatttagctgttggggggagggggtgaatgggagggagcgttgagggttgaggacacaacttggggtcccaggaatgaatttgcaatgttttcctttccattttttctttatttttttagaaaagtcggtgtgtagttagattgcaaatattttgtgctttgtagatgaacctttctcttcttggtacgtggcatctgggaagtgtctgcacactttttaactacccagcccctgattccttaggtcatatttatcttaattcaatttgtgcttctcctttaacttagggagactgggaggctaatcagcatggctgctgtctgccagtggctgagctaattgatttgaatcctggcccaatactttacgctgcctttttctgtaaaagcttgtgatgcttatggaattatggaaaaatggggaaagttgtctacaaaaaccacaacaaaaccatctccagtaaacctttgtgagctagcttctctctttttttttctatgaaattgactgcggtgatatctgtagagcatctactatgtgttagacactgcttacatttattccttaaaactaaacattaagcctttttttttttttttttttggagaccgagtctcgctctgtcgcccaggctggagtgcagtggaatgatctcggctcactgcaagctccgccttccgggttcacgccattctcctgcttcagcctcccgagtagctgggactacaggcgcccgccactgcgcccagctaattttttgtatttttagtagagacggggtttcaccgtggtctcgatctcctgacctcgtgatccgcccgcctctgcctcccaaagtgctgggattacaggcgtgagccaccgcgcccggcctaacattaagccttaatgaaaattatagatagggctgggcgcggcactttgggaggctgcggcgggtggatcacctgaggtcaggagttcgatagcaggctaaccaacatggtgaaactccgtgtctactaaaaaaatgcaaaaaaattagccgggcggggtggcgggcgcctgtaatcccagctacccgggaggctgaggcaggagaatcctttgaacccggggaggttgcagtgagccgagattgtgccattatactctagtctgggcgacaagagcgaaactccgtctcaagaaaaaagaaaagaaaagaaaatgacagatagtagaaagatatctctgtccttagtccggtagagtgcaagtctttttttttttttttttttgagacggagtcttgctctgttgcccatgctggagtgaaatgccgagatctcagctcactgaaacctctacctcccgggttcaggcgattatcctgcctcagcctcccgagtagctgggattacgggcacacgccaccacacccggctcattttttgtatttttagtagagatggggttttgccatgttggccaggctggtcttgaactcctgacctcgtgattcgcccacctcggcctcccaaggtgctgggattacaggcgtgagccaccgcacctggcccagtagagtgcaagtcttaaagcctgagttgtcttcttaggttatggttgtagtgcttcgtggattcttactaaattccagttttacttaatccgataaaagagactttacaagtctgtagcctcacactgctgccgttgtctttaagatctttcccttaatcacttggtctggcataccagctgacagaggaatattcccaaggcgtcctgctgtcttgttgatttacccagtcctcagtgtcttgtattaacttatctttgcctaccaagtgaaggacacacattgagctccacactcaaggccctctgctctatggtaccaacctcttttgccaggtcaccttctttggctcctaatttaaacagttggaattaattgctgttattcaaatgggcatttggtcgtactgcttctttctctcgccttcaaactggaataccctatcttttatatcctcataaaaattctatccttccttcaaggcccatctcatgtcacatcctgattcatctgttagtgctctgatttgaattcctgtagtattttgtatcttaattatagcactcagtatctcatcttgtatgcttatcgtattctagatagctatttcagatgagggcggcaaacactgtgtgtaggggcaatcaaatatttgtcaaattgtcaggacctttcttgtgttgccttaactacactattgttagctataatttggggttgatgaattttaaaacaaaccctgaatgaaatttgtgtcctgccaaacctttaggatatacctgcttatggcttttggatgtacaatttaagccaaaacaggatgggttacattggtgaagtttactttttgcttctgaaataacatctagaatgttagtttgtagaataaacattttctaagaatttttttacattttttacctgtaaatgcaactctttttacaattcttcatttcctttggaaggagtccaaaactacttacctggaagaccttccaccaccccctgagtatgaattggccccgtccaagttagaagaggaagtggatgatgtctttctcattcgagctcaaggactgccctggtcatgcactatggaagatgtgcttaactttttttcaggtatattttatgtatgttttatttatttattttttttccttatattgtttctcacaagcaggtatgtatgttttaagtatgtaattttgtctgagtaaaaggtagtgctacaaatccatgtcagactacgctgtcaccttcctttttgatggttgggaactgtctcattctggttggttgcatataccaaatgataccatgtgtgctgtttgcggtatgtaacgaattgaaagactttgggccaggggcagtggctcaggcctgtaatcagcagtttgggaggccaaggtggaaggatggcttgaggccagtagttccataccacactgggcaacactgtgagactgtctcaatttacatatgtataaagactttgaatgcaacaaaagtattttaacgttaagactgcatagtatgggccaggcgcagtggctcacgcctgtaatcccagcactttgggaggccgaggcgggcggatcacaagctcaggagatcgagaccatcctggctaacatagtgaaaccccgtctctactaaaaatacaaaaattacccaggcttgtagtcccagctacttgggaggctgaggcaggagaatggtgtgaatccgggaggtggagcttgcagtgagccgagatggtgccactgcattccagcctgggcgacagagtgagactctgtctcaaaaaaaaaaaaaaatccatcatactatgtaggtttttttttttttgagacggagtctcgctctgtcgccaggctggagtgcagtggcatgatctcagctcactgcaagctccgcctcccgggttcacaccattctcctgcctcagcctccctagtagcgactgccaccacacccagttaattttttgtatttttagtagagctggggtttcaccgtgttagccaggatgatctcaatctcctgaccttgtgatctgcctgcctcggcttcccacagtgctgggattacaggcgtgagccaccgtgcccggctggtatgatggaatactacgtagccataacaaagagtgagattatgtgctttgcagcaatgtgggtggtgctggagaccattatcctaagcaaactaacatggaacattaaacttaatactgtatgttttcacttacaagtgggagctaaacaatgagaacacatggacacaaagaggggaacaagaagacaccagggccaacttgagggttggggagaagattaaaaaatacctatcgggtccaagtgcggtggctcacgcctgtaatcccagcactttgggaggccgaggcgggcggatcacgaggtcaggagatcgagaccatcctggctaacatgttgaaaccccatctctcctaaaaatacaaaaaaaattagccgggcgtggtggcacgctcccgtagtcccagctacctgggaggctgaggcaggagaatcgcttgaatctgggaggcggaggttgcagtgagctgagttcacaccactgtactccagccgtggtgacagagagagactctgtctcaaaaagaaaaataaaacctattgggtactgtgcttgctacctgggtaactaaattatctgtataccgaactcccataacacatggtttacctatgtagcagtcctatacatgtactaaataaaagttgaaaaacaaaattacatggtttgaaattatttttctctgtggtattaatatatacatatcaaaaagtcaagcctgtcagtggaaatatggaattaagggtgactctttatgtaatacagacatttacaatagaaggtcacttagtatcaaggaataaagttcccttaataacatgtttggagggtttacatatctgtgggatttttttttttagtttctgtatctgactatgatttatttttattaatttttttgagatggagtcttgctctgtcacccaggctggagtgcagtagcgcaatctcggctcattgcaacctccacctcccgggttcaagggattctcctgcctcagcctcctgagttggtgggacagcaggcacctatcaccatgcccggctaatttttgtatttttagtagagacagggttttgccgtgttggccaggttggtctcaaactcctgacctcaggtgatccaccaccttggcctcccaaagggctgggattacaggcatgaaccaccatgcctggctatttcattaatttttttagctgctccttgtggagcaggagtaaatcctaggcagtatgcccagagtgagcctggtcaaacttttttttaaagccacttggccacttacatcttggactactcccattataaaaagtatgcagtatgaaaaggggaaaaaggctgggtgtggtggctgatgcctgtaatcccagcactttgggagactaaggtgggaggattacttaagcccaagagttcaagaccagcctgtgcaacaaaatgagaccgcctctctacaaaaacaaaaagttaaactatggtaataaaattactcatacaggaaatattttagagacctatggagatgattttaaaggaagacacttatgtataaatttaactatattgtatttccttaagtgattgtagaaacattgcaatagaaataatgaattttgtgttgggcctatcctgatttgctatttaatgatcaggaaggagatcataagcttctgtgctaaggtttgcttatcttttctacttggaaggttttagagactaaatccttattggtgtttggatgacttcagtgatggggatttgtgtaaggaatatgacacttgtttcctgctttgttgttggaaaactgcattcttgtgacttacataattgagctaaaagtttgatttctgttttcaattgattttgctcatacacttttagactgcagaatccgcaacggtgagaatggaatacattttctcctaaacagagatgggaaacgaaggggtgatgccttaattgaaatggagtcagagcaggatgtgcagaaagccttagagaagcaccgcatgtacatgggccagcggtatgtggaaggtatgtgaagtcagattatggctttttgggatcattgcattaggttttatacttttcaaggtagtttttatttgatccttaataatgaagtatttagattgtatgaatgcattcttttataggatgtgaaaataaaacataaagagataaagtttcttttttttgtgggggggatggaatctcactctgtcacccaggctggagtgcagtggtgcgatttcagctcactgcaacctctgcctcctgggttcaagcaattctcctgtctcagcctcccaagtagctgggactacaggcacatgccatgatacccagctaatttttgtatttttattagagatggggttttaccatattggtcaggctggtctcaaactcctgacctcaggtaatccacccgccttggcctcccaaagttctgggattataggcgtgagccagtgtgcctggccaatgaagtatcttacaagctgtgagaaataaagaagttatgcccgcatggtaaatatgcaataaatgtcatttgttattttctctagagaagcgcataaagattaaaatagttattgaattctcagataacccagcaagttgtaatgattttttttaatgggtttgttcctttgttatgtaaatttttcatccctgttgggttttttcttcgtagtatatgagataaacaatgaagatgtggatgccttaatgaagagcttgcaggtcaaatcttcgcctgtggtaaatgatggtgtggttcgtttgagaggacttccttatagttgcaatgagaaagacattgtagacttctttgcaggtactttgcagttgtattatgcttgggagctcatatcttttttcccttggtatctccttctatatcttagatgagcctgtttctgggcaaaggcatgcagttatattaggttctttaggggagagctcttcacttaaatttctaatatttatagattttatatgtgtttttgttctatcaggcagattttaggagggaagtcagatttcagaataatttcatgagggttttactattgaaggaaataacttctcataatagttgctgtatttgtgtaagacaataacaatttatataatttaaaagtattttctaattcctagaaccattagcagtgaagtctgtgatttctattgtttcctagtatataattaacagcaaaaaaaaaaaaaaaaactggtggggagaattgtatgttttgggtgggcttcttggaccttacctattctggaaatacaagtatgtaggtgttgactgacttttgactgcataataattttcttcctgtcaagcatgtattcagttttgggactggcaaaacagaataaaaattttattagtatgtgaatgatggtgttaattctaaggataaaaaagcctgctagtagcattaaaatctcttggtgtcctaggactgaatatagttgacattacttttgtgatggactatagagggaggcgaaaaacaggggaagcctatgtgcaatttgaagaaccagaaatggccaaccaagccctgttgaaacacagggaagaaattggtaatcggtgagtaaagcagatactaatgatgcagaagtgttacacattaagtcattttgatgaatgtgctgtaatatgactgaaaagttatccaaacatagaaaagtagagagagtagtgtagtgagccatcaaatgcccataatttagattaacaattttttttcgactgctccttttttttttttttgagacagagtttcactctttttgcctaggctagagtgcaatggcacgatcttggctcactgcaacctctgcctccctggtttaagcgattctcctgcctcagcctcccaagtagctgggattacaggcgcctgccaccatgcccggctttttttgtatttttagtagagacggggtttcaccatgttggccagggtggtctcgatctctcgaccttgtgatccgcccgcctcggcctcccaaagtgctgggattacaggcgtgagccaccgcatccggcttgactgctccttgtggggcagggactaacccatagacagagtacctagagcagctagattaacacatttatatataaaatgtaacatctgttatatttgcttcatctgggttttttttagtatgcatcttttaaaaaaatttttttacataatttcaatgttatatctaacactgttagcaatagtatattatctaataacagttcataatagcattttcccaattataccaaaaatagcctttttttttttggcaacggagtttcactctgccgcctaggctggagtgcggtggtgtgatcttggctcactgcatcctctctctgcctcccagtttcatgtgatcctcctgcctcagcctcctgagtagctggaactagaggcatgcgccaccatgcccagctaagttttgtatttttagtagagacaaggttttaccatgttggccaggctggtctagaactcccggactcaagtcattcacccacctcggcctccaaaagtgctgggattacaggtgtgagccagcacaccggacaaaaatacagaatccagataaggtctacacactgcatttgattgttatgtccataattctctgtgtgtgtgtgtgttttttttttttttttaagacacagggtcttattctgtcacccaggctggagtgcagtggcatgatgatagctcactacagccttgaattcctgggctcaagcaatcgtctcgcctcatcctcccaactagctagaacaataggcatgtgccgccacacctggctgtgtgtatgtgtgtgtgcgtgcgtgcgtgtgtgtttgtaggtggggtcttgctgtgttgccctggctggcctcaaactcatgggctcaagtgatcgcccgctttggcttcccaaaacgctaggattacaggtgtgagccactgcacctgaccactgattctcttgaactagagcaaatcccccttacttattcttcccccctttttaaaagcaattgacttttgaagaaattagatcagttgtcttgtacagtatctcatgttgacatcacctcaggatgcacatgatgataagtgggttcatttgtgttttaactttaactttggaggtacagtttaaaatgtcaaatgttaaatcactgtttcgttaatttttttttttactgttttctggccttttaaatcagctcctttgaagtaaacaaaacagccattccaaagccagtgtttcaggatctactgatagaagtggttcaaaggttttttggttttttgagacaggatcttgctctgtcacccaggctgaagtgcagtgccacaaacactgctcatttcagccttgaccttctgggctcaagcagtcctgccatctcagctttccttgtagctggtaccacaggcatgcatcaccatgcctggctaattttagacagagtcttattctgttaccctcgctggagtgcagttgtgtgatacagctcactgcagttgtggcctcctgggctcaagcaatcctcccacttcagcctcccaagtagctgggactacagatacatgccaccacacccagctaatttttgtatttttgtagagacggggttttgcatgttgcccaagctggtctcacactcctgagctcaagtgatccacctgcctcagcctcccaaagtactgggattataggtgtgagccactgtacctggtctcctggctaattaaaaaaaaaaacaaaaaaaaacttttgtagagatggtgtctcactttgttgtccaggctcaaaggttttttttttaaagaagtagtgctcatctaatctttatagatttgtaaacacaagctagttttataactcttagtttagaaggccatgttaagaaaaaggaaactgtgctgggcgcggtggcccatgcctataatcccagcactttgggaggccgaagtgggaggatcacttgagcccaggagttcaagagcaacttgggcaacatggcaagaacccatgtctacaaaaataaaaaataaaaaaattagcagtgtgtgggctgggcatggtggctcatgcctataatcccagcactttgggaggctgaggcaggtgaatcacctgaggtctggagtttgagaccagcctggccaacatagtgaaaccctgtctctactaaaaatacaaaaaatcagctgggcgtggtggcgggcgcctgtaattccagctactcaggaggctgaggcaggagaactgcttgaacccaggaggcagaggttgcagtgagccaagatcgtgccattgcactccagcctgggcaacaaaagcaaaactctgcttcaaaaaaaaaaaaaaaaaattagcagtgtgtggtggcaggtggcagtagtccccagctactcaggaggctgaggcaggaggatcacttgagcctaggaggttgaggctgcagtgagccatgttcacaccactgcacaccatcttgggtgacagcaagaaacccaagtttcaaaaaaaaaaattgttccagaagcttgggtttaatagatagtcccctcctgtgatagcaagtcataattgatacttagttcttgaattctcagccttttagtgaagttctggggaagttagctcttcttttactgtgacttttaatatcttatacagatatgattaatttgcacagaattgaatttcagagcttcaagagattgttaaccagcaatttaaaaaacccttatgagattaattttttctgtatacacaattaacttaagcatagttgttctcatgaagcaaaacagagtagaaaatattattaaaatgtatgtgaagaaaaagtgttaccttgatgcaaaaacttaaatcagtgacctactctgttgtatattttcatgggctactatctgtatgcattattagttttccctacctgttatcttttgacacctgtgtttcataagctgttggaaatataatgtatacatgtttattttaaatgagttcagtataaagttactttgcaccatttgtgcctgtttacttttgctttgacatagatacatcgagatatttccaagcagaaggaatgaagttcgaacacatgtcggttcttataagggaaagaaaatcgcatcttttcctactgctaagtatataactgagccagaaatggtctttgaagaacatgaagtaaatgaggatattcaacccatgacagcttttgaaagtgagaaggaaataggtaaggtcctgcctcttcttgagactcattgggtctatcttgaatgttttgggttttgtgatttttttttttttgagatgaagtctcgctctgttgccaggctggagtgcagtggtgcgatctcggctgactgcagcctctacctcctgggttcaagtgattctcctgcctcagcctctttgagtagctgggactacaggcgcatgccgccacgcgcagccaatttttatatttttagtagagatagggtttcgccacgttggccaggctggtctggaactcttgacctcaagtgagccgcagcctcctaaagtgctgggattacaggtgtgagccaacacacccggcctaaagatttaataggactttacatactttgagtatatgcagaaaggcttaattattttgctaggtttttaatttaatcatttttattaactatatcaaaagctgggtagtaaaaatgtgataaaaggaagtaagatgtcaacatttaaattaagatgggggaagatttggataatgagcaggaatattgactgaagtaaggatttttttttttttgagacagagtttcactctgttgcccaggctggagtgcagtggcgcactctcggctcactgcaggttccgcctcccaggttcacgccatcatcctgcctcagcctcccgagtagctgggactacaggcgcctgccaccgtgcccggctaatttttatatttttagtagagacggggtttccccgtgttggccaggctggcgttgaactactgacctcaggtgatctgccggcctctgcttcccaaagtgctgggattacaggcatgagccactgtgcccgcctgaagtaaggatttttgtttgcttctggatttaattatttctttgattcctaacccagggcaacatttggaatcttttaagtttcataaatactttttaaactggtaccctgggattatcttgtcactatatatatgtgtatatatatttttgttttttgagacaaagtcttgttctgtggcccattctggagtgcagtggcacaatcatggctcactgcaaccttgaactcctgggctcaggcagttcttccaccccagcctcctgagtagctggaactataggcatgcatcaccatgcccagctaacttatttttatttttattttttgtagagacagtgtctggctgtgttgcccaggctggtctcgaactcctgggctcaagtgattctcctgcttcagccttccaaagtgttgggattacaagtgtgagctaccacgcccagcctttgttcttttttttttttttcagtgcctataatctagaaagtctcttttagggtttaattcataatcattttacctgctctctgatgttacaaaaagggctaagttcttaaactggtaatggtctgaggcattcagtgcttatgggtgttcaggtgatatttgttgagtggcagaaatttcagatcattttggcttttaatgctcttaagaggaattgaggatttggacataaaagtcatacctaattagaatctgttaataacccttgaagctgttatgttttaacagtgctttctgttccacctctcagaattgcctaaggaggtgccagaaaagcttccagaggctgctgattttggaactacgtcttctctgcattttgtccacatgagaggattacctttccaagccaatgcccaagacattataaacgtgtgtggcagtaagatatccaatctcaatagatttgaacaaaagttctaaaattgaacttgtattaatttggggaaggtagagaagaaaatatagtgtttctgcgttggatagtaagatggcatcttcctggttgcaaagcttgcttctttttctgtagctgaaaagtgtggcttggtattacttttttttgtgacagagtctcgctctgtcgcccaggctggagtgcagtggagtgaacttggctcactgcaacctctgcctcccgggttcaagcatttcttccgccttggtctaccgagtagctgggattacaggcaggcgccaccatgcccggctaattttagtattttcagtagagatggggtttcaccatgttggccaggctggttttgatctcctgacctcaagcgatccactgtcctcggcctcccaaagtgttgagattacaggtgtgagccaccatgctcgctgagagcagatatttgaaatgtcactttgagttctgagaaaaagtaaaaagccagaagacatactagatatataaatatattactgcttaaaaagatttcctaaaaagaaatgtatcaagtgtatgaatcaaagtctgaaagaaagatgaagagccaccagacttctaggtaggtttacatccatcatgttcctcttgactgcctttgtttgtcgtttagttttttgctccactcaagcctgttagaatcaccatggaatacagctccagtgggaaggccactggagaagctgatgtgcactttgagacccatgaggatgctgttgcagcgatgctcaaggatcggtcccacgttcgtaagtcctgcctttggcttttgttgtcatttttgatgcttgtctttgcttacaaatatctttttctgttttgggattgtagaatttttccttgagaaatttgtattcttttagtactagtaaattaaacgtaacagataaaacactatattataatttaaaaaattttgtctgctaattatcctgcaaatctctttctttcttttttttttgtcacccacgctggagtgcagcggtgccatctcggctcaccgcagtctcagcctcctgtgttcaagcaattctcctgcctcagccacctgagtagctgggattacaggtgcctggcaccgtgcctgactaatttttctatttttagtagacacaggtttcgccatgttggccaggctggtctcgaactcctgggttcaaatggtccacctgcctcgacctcccaaagtgccgggattacaggcatgagccaccgcatccagcctgtttgtccattttacattttgtttgtttgtggttgtttgagacggagtcttgtctgtcgcccagtctgtagtgcagtggtatgatctcagctcactgcaacctccgcctcctgggttcaagtgattgtcctgccacagcctcccgagtagctgggactataggcacccaccaccacactggctaatttttgtatttttagtagagatggggtttcgctacattggccaggctggcttgaactccttacctcaggtgatcctcccacttcggcttcccaaagtactgggattacaataggcgtgagccaccgtgtctggcctaaattttgtttttaattagggaaaggaaagggcaaagggtttgagttgctgtctgaactgtgagaaaaatggctgtaatatttttctaccttttcaactttttaaaactaatctttctcattatcctcagatcataggtatattgaactgttcctgaattcatgtccaaaaggaaaataagactctaggggctccagataataaggtaaatttaagaggtaatactgtgggctgggtgcagtggctcacacctgtaatcccagtactttgggaggccaaggtgggcggaccacctgaggtcaggagttcaagccagcctggccaacatggtgaaaccctgtctctactaaaaatacaaaaattaaccgagcatgatggtgggtgcctgtaattccagctactcaggaggctgaagcgggagaatcacttgaacccgggaggcagcggttgcagtgagctgagattgtgccactgcactccagcctgggcaacagagcgagactcaaaaaaaaaaaaaaaaaagagagagatacaactgtggaaattatttgctattgataaactaataatcattcactcactaatttgtaatatggtagaaaccattctctttttatttttcaaatttttttagggactaggtcttgctctgttgcccaggctagcagtggtgcgatcatagctcactgcagcttcaaccttctgggctcaggtgattctctcacttcagcctcccaagtagctgggactacaggtgtgtactaccatgcctacctaattttttaattttttgtagagatggggtctcactatgttgcccaggctggccttgaacttctggccttaagtgatcctgctgcctttgcctcccaaagtgttggaattacaagagtgagccaccccgcctggcaccattcctttttaataaagatcaaactaatgataattgaagtgtcaatataaggaatgaaaattctcgctctggcttctcagatgtggggggcaaaaaaaaaaaaagaaaattctgctgggaaatagaattaattatgatattttttcattttttttaaattttattttatttatttatttattttttgtgagatggagtttcactcttgttgcccaggctggagtgcaatggctcgatctccactcactgcaacttccacctcccgggttcaagagattctcctgcctcagcctcccaagtagctgggattacaggcatgcaccaccacgcccagctaatttttgtatttttagtagagacggggtttctccatgttggtcatggctggtcttgaactcctgacctcaggtgatccgcctgcctcggcctcccaaagtgctgggattacaggcgtgagccactgtgtccggcctactttttattttttttgagacagagtcttgctttgttgagcagactagattgcagtgatgcagtctgggctcactgcaaactccgcctcctgggttcaagtgattctcctgcctcagtctcccgagtagctgggactgcaggtgcccgccacaatgcctggctaatttttttgtatttttagtagagatgaggtttcaccatgttggccaggctcatcttgaactaactcctggcctcaagtgatttacctgccttggcttcccaaagtgctgggattacaggagtgagccactgctcccagccataattccttatgatttatatggtagctttgagcattatctccatatagaatttttatgcataatttccaacatcatgctgtttgccaaaaaatagccacctttagtagctataaatcgtaatagactggatatgtgacttgcattagctttttttccccacttaaatttaaacacgttttccattttctcaggttacttttgttttttttttttttttttttttgatatgaaatctcactctttttgcccagggtgaagtgcagtggcacaatctcagctcactgcaacccctgcctcccgggttcaagtgattcttctgcctcagcctcccaagtagctaggattacaggcattctctaccacatccagctaatttttgtatatttagtagagacggggtttcaccatgttggccaggctggtctcaaactcccgacatccagtgatccgctagcctcagcctcccaaagtgctgggattacaggtgtgagccaccacgcccagccattttctgttttaaggtatttttaaaaggataccatgtgaaaccagagtgtatcatccataaacacagttaatgtgccactgtttccttttcctaaaatggcattttttttttgccttaggaagtacataattttatagtgttaacctacccgtgagatttgcttaatacatcttgatgttccttgcctcgattaaatatatggtgtcttttttttttcccataaggtattgtaagtattactgttgtattgcagtcacttttctacaggtaatggctcattcttttgagacacttacctgtaatgatttcttgaaaacacatggggccaggcatggtgggttactccagtaatcccattacttcaggaggctgaggcaggcagatcacctgaggtcaggagtttgagaccagcctggccaaaatggcgaaaccctgtctctcctaaaaatacaaaaattagctgggtgtggtggtgcatgtctgtagttccagctactgggaaggctgaggcaggagaatcacatgaatctgggaggcggaggttgcagtgactgagatggtgccactgcactccaccagcctggatgacagaacgaaactctgtctcaaaaaaaaaaaaaaaaaaggaacaaaaaaacacggacattcattctattactatatcctattctattgctttttttttttttttgggagacggagtctctctctgtcgcccaggctggagtgcagtggtgtgatctccgcttactgcaacctccgccccccgggttcaagcgattctcctgcctcagtctatgaagtagctggggctacaggcgtatgccaccatgcccggctaagttttgtattttatttttatttatttattttttgagacggagtttctctcgttgcccaggttggagtgcaatggcacagtctcagctcactgcaacctctgcctcctgggttcaagtgattctcctgcctcagcctccccagtagctgggattacaggcatgcgccaccacacccggctaattttttatttttgtggagacggggtttctttatgttggccgggttggtctcgaactcctgacctcagctgatctgcccgcctcaacctcccaaagtgctgggattacaggcgtgagccaccgtgcctggcctcttctgttgctatttttggatatgaagtcccacaattctttggtgttaaatatttataatagctaaaatctatttaaaatatattctgaaactcagttttttgtaccagcctgtaaacactaatgcctgactagttttcctcactttaactcggtttatcagatagcttgcactaaattagaaaggagaaaaatttgaatttgcaattttaaatggtatgggaatgtgtgccatcctttttcatcttgagtaaatgtacaatattttttgttttatttttagggtgaagcaagaagcatttcatttgcacatctttcttggacttgggatatacagttccagtttattagcagcaactgctagggaaatgattttggtgttttgggttaattgcttctaagaaaagtttcatagtggactgtttagaagaagaaatgaaagatccagtttgggattatgaaataaaccacaaattaaaatttttgtttaaactgtccaggatctgatttaaaaatatggtctttgttttatatgattaaatggtttgttttcatagatgatatgttactcattgtaaagaccacatatttttattcagcagtgttctttaaacggtttcatttaaaaagtaactttttttttttgcctgtgaattgagtgctctgatgtaaaacttctcatggagtgaaacagtgatttattttaaccaaacattcaccaaagcaaagaacggtttcagacctttgaactggtatggtttggcagaatagttttaaattttgctgtatttgattacttagagataggaatttttaaaaatcaaaacaaaaaataccacagcttagtgtaaatgacaatttggcggttttatgtctttagaaatgttttgcctttctaagccttgtgctaaaggcgtataacggtggtgcctatctacttaagggggcattctagtcttaacttaaaagttgtctaaactgtccctccctggctttttttggtttggggtagacctaagggtgtttgttagtctcaaaactgtgaagtgacatgtcagaacagtccagactggtaagaaaattaatggcttcacttgaatttaaaccagctctagataggaaaaaaatcagtctcctcatttgctttttaaatggagtagtacatcccatattttagaacaagtaggggtgccttgcttaaataaaaatagcatttaatgtataattgtgtgaagggtttatggataaagctgtacttctgtcacaatgtggcagtactttctgctttaatattaaacagcttgttatttaaatattggacaaaatggctggcttcaaaatatagtcattaataaactaactttatgtgcacctgtgtaggagaatcaaaatcctgtatgctttctttgccttgttcctgttctcagggtgacgactgccaccaggagatgcagttctagttcttaaaattaaatttgcccaggtttctgacaggtgatacctggaagagagactatgtcttctcttacttaatacataaccatctttgattaccagctaagatgcgaaatcactgtactgtagtcaataaatgaagacttgtttcaggctgaagattacctaagagtatttattattggagtctgtgagtcaactgaatatattattacctcaagtcctgctatattaatataagtagtaagggttaattttcgtgtgtgtgttctctaaaatcctgtgaacatgacttaaccagcttaacatcatcagtagtactgcctagatggaaatgcgttttcatatatggttgaatatgccaagctatgagaactggtatctgtagttgtacgaactattagaatgtgatctttgttgctctttcacatttggtatctgatttgctgtggaaaagatctgtggggcctactgtgaggaattcatctgcaattgatttaagctaatgagttttatttgcacatctctggaaaaagaatgcaagcaaagcattaaaatgctatatgatggatgggtaaggttgaaaggatatatcttcttggcacgctacaggctgagttttctgtacaaaatgtggccattattgggaaatcattttatgtatttgaatgctcccttttgtttttgttcatgatctaggctagtacgtaagtgattgctaaggtggatgtagttatgggaaaggaagagaagcacataatacagtaaaagtaatcttatttccatgcaagtggaagacggtaccgtctccccacatttgagaagactgttttgcatcactctttgctattgaaggaagcagtgatggtgaatttccttctgtttgggttccttgtgtctataacttcctttgtggtaaagccatcaggaagaatagtgggagtggggcatatggtcagggtgctcatatcctgctttagcctagctgctgcttacggagtgcaagggagaactctgagaagcagtatgtaaataccagggagctgattgctgaatattgtggtctcatctgaatattgtggtctcatctaaatattgacaccaggcaatgaagcagaaatagagtatgtgtccctttatgcgtgggtaacttaagcttctgtcatgtgggaagggggaccgaatcttccctgggaggaaggctccaaattctcactacttctgtgttacttgaagggggaagcataaggaacccagtttgaaggcaacattgtgtgccatgaatctgcttattaatcaacatgccttgttaatgtcctctgccctgaacagcccttactcagttctcatttggaaagttattttttggggttacatcctgtttgtttcagaatttaaaaccctccatggtgggtcacttgaggtcaggagttcaagattagcctggccaacttagtgaaactccggctctactgaaaatgcaaaaattagccaggtgtggcacacgcctgtaatcccagttacttgggaggccaaggcaggagaatcgcttgaacctgggaggcagaggttgtagcgagccaagatcacaccattgcactccagcctgggcaacagagtgagactctgtcaaaatcaaaaaaaccaaaatacaaaaaactccattgttctgagagtttcccctaaattatcggaagacactcacattgaattggtaggacctatagtatagaggagaatggtatgtatgtcagcagtagagttccaatccaaattgcgctatcgcattagaaatacattaccctcccactccccaagttcagcaaattagaagagaatctgaagtttgtaggaagggaataaagctgctataaacatttatgtgcaggtttttgtgtagactcgttttcagctcctttgggtaaataccaaggaaccaggttgctggattgtaagttaagagtatgtttagttttggaagaaactgccaaactgttccaacatgactattttgaattcccattgacaatgaataagagttcctgtagctcctcaccctcattagtatttggtgatgtcactcttgcattttagctaatgggtgaatagtggtctcatcgttttaattcccaatcccatagtgatgtggagcaccttttcatatacttaatctgccatccttatatcatcattggtgaggtgtctggattttctgtccagaattttagttctagtggttttcttatttttagaaaggaagtataggaaggaaggtttaatctgtcttaagcctgattatatgaaaatcaagaataggctaggtgtggtggctgacatctgtaatccccgcactttgtgaggctgaagtgggaggactgcttgagcctgggaagtcaagcctgcagtgagccatgactgttgctgcactccagcctgagtgacagagtgagaccctgtctcagaaaaaaaaaaagcaggctcattttaaagttgtttatattttattttttgaaggaaataaacttgaagagatacaaacggtagtgaagattctccttcccctcctgtaattcagctgtttagtttctattctcgcacagccctgttatcagtttctagtgtaagcttgcagtgacttttactttatttataagcaagtgttagtgggtgttgtcatttcttttaaaaatataaattatactgtacatgctattttgtattttggcttttctcccacctaaacaccctaaagatcattttctgtcagtatataaaatcttggtgatgccaatacccatcccttagattgtacaagcagcattttgccatgctttatcccatagcctgcctcctgcagtctcatctttttttctatatgcatgtccaagtaagttgtagacatttttcacttttaatcctttcagcatacatgtcatgggaatttgtttttgtttttgttttttgtgtttgagacagtcgctctgtcacccaggctggagttatagtgacgtgatcccagctcattacagcctccacctcccagtttcaagcaattctcatgcctcagattcccgagtagctgggattacagatgtgcaccaccacgcctgactaatttttgtatttttagtagagatggggtttcatcatgttggccaggctggtctggaactcctggcctccagtcatttgcctgcctcggcctcccaaagtgctgggattacaggcatcagccaccacacccagccgtcattggagtttttttgagggagatttgcagtaaggtgaataaatgttaagtgtatcatttgatgaggttttttctttttttttttttttttttgagatggagtcttgtatcgcccaggctagagtgcagtggcctggtcttggctcactgcaacctccacctcctgggttcaagggagtctcctgcctcagcctcccgagtagctgggattacaggtgtgagccaccatacccagactcatttgatgagttttgatgtaaaagcatgtaactcaaacccctatgtctggaacatctgtattacatctgaattttttcacctagtcaattcctgcacctctctctcctgtcccttcttccctcccctggcagtcagctactgttaggattttgttcactgtagattaattttgcctattctagaacttcatataacggactcacttatgcagtatgtattctgtaagttccttttactcagcatgtttgtatgttcatcagtgtgtttaagctttgttcctttttatggctgagcagtgttctatgtatgaatgccacattttaacgtttcacctgttaggtgaacaactaactggtgaacaatgggctgtttctagtttggggctatcatgaataaagttggtatgaacatgtacaac

SEQ ID NO: 22 - DNA, 32696 bp, Homo sapiens
ggccttgtcagctcacagcaggcgttaacagcctctaattgaggaaactgtggctggacaggttgcaaggcagttctgctccccatcgtcctcttgctgactggggactgctgagcccgtgcacggcagagagtctggtggggtggaggggctggcctggcccctctgtcctgtggaaatgctggggcaagtggtcaccctcatactcctcctgctcctcaaggtgtatcagggcaaaggtaaggaggtcctacctggcgtggggcgagggagggactaggagctgtgcccctcagggagatcagagccagagcctctgcttgtgccacatacacagtcatctggaacttgactccgagcagctcctgacagctctgacagtctaaatcagacaggacaggctggcagtgcactgggaggtctgtgagaggggtatctggccctgccaccagcaatccaggaagtcttgggtgaggagattccttcccactggcttcaatttacccttccgtgtagtggagagagaagcctccttccagccgcctgtaaagatgatgaaaattgcatcctccaattgtggcatgagagaagagaagcagtcccaaggaagtgggtggttctcgagctcagagacagatggatggacccctgaggcaggaaagctgagcccagggaggggagggcgaggccagcagccaggaagaagctggaaggcatggtccctcatctccccggcttcttcagccatccagatgccacaggagcctggaaattattagggacatgcagggttggggcagaagaaggagacaatatgaggaagctccacagcaaacctaaagctgtcagccaggcatggagccatctaacatttactcctggggatcccagctgagggctgctcccctctttctccagttctggggtccaggatgctctgaaacctggatcccgcatttaatttaattgaattaatttatttatttcatttttaatttttatttatttatttattttttgagacagagtctccttctgtcacccaggctggagtgcagtggcgtgatcttggctcactacaaactctgcctcccgggttcaagtgattctcatgcctcagcctcccgagtaggtgaaattacagacgtgcgccaccatgcttggctaatttttgtatttttagtagagaccaggtttcaccatgttggccaggctggtcttgaactcctgacctcaggtgatctgcccaccttggtctcccccatccaaagtgctgggattacaggtgtgagccaccatgcccagccagggttctgcattttagatcagtgactctgcaggggcttcacggaggtggagagcgtggaattagaggagggtacactctgggcacaaagaggggaaactgaggcatagtgttgtgtgggttcagggccaggtagaagccccatatgcaataaagtcccatgcccaggtactcaattcagttaccgagtccctgagcattcttgtgtccttcaggaagacacagtcaaggctcaggtggactcaacatttgtaaggatgcaggcagcctagggcagagcatgatgaggaacagggagcagggagggaggagtggagcctgcagctcttgtgggtgggttggggggcctagtggcccaggattctaggcaggagagctaggttggaacctggtctaaggatccttgaatgcagctcagacagccgaaggaggactgatgggattggtgcctggctgtggggatgagagtaacagagaagctgaggttatgaccctgaggtcatgagcctgtgtgacagagggcaatgctccctccacccccattcccagggcttcagcaccatagctgggcttggctatgccggcccttgcacggtgaagctggtgagtgacttgttaggcacagggagggatggacttgggtcttcctgagctgcttcctcctccatcctgtgtctatagggcaggcctggcataagttgactgaagctgctctatttctttaatttttaagctttttagtttgaaataattgtgaagttccagggaagctgcaagaatagttcaaacgattcttgaatttctttcatctagattcaccaattaacattttatcacatttactttatttctctttctctagctgtatgtatatgtgtgtataaatgtacaataatttttgctgaaccacttgagaacaagttgtgacattatgtccccttactcctaaatattttagcacttatatcctatgaacaaagacattctcatgttactacagcacaattgtcaaattcagtaaatttaacattaataccatcaaatatgctttccatattcacatattaccaattgtcccaagaatatgctttattttttttttttgctgacccaagatgcaatcaagatcatgtattacattcagttgttatgtttctcatgttcagtctatgaccatactttaacctttcttcatctttcatgatattgcattcttgaagaagacaagccagttgttttgtagagggttccttaatctgggtttgtctgatgttccctcatatgattcaggttatcatatgcatttttatttattttatatcatcattattattattttttagagatggagtctcgctctgtggcctgggctggagtacagtggtccaatctcggctcactgcaacttctgctcccccgggttcaagtgattgtcctgcctcagcctcccgagtagctgggactacagatgcatgccaccaagcctggctaatttttgtatttttggtggagacagggtttcaccatgttggccaggctggtcttaaactcctgacctcaagtgatccacccacctccgcctctcaaaagtgctgggataccaggtgtgagccactgtgcccggcctattattatttttcaagagaggatctggttctttcacccagactggagtgcagtggcatgctcacggctcactgtagcctcgacctcgcaggctcaagccatcctcccacctcagcctccctggtagctggaactagaggtctgtgccaccatgcctggctaatttttttttttttttttgtagatacagggtttccccatgttgcccagggtggtcttgaactcccgggctcaggcgatccacctgcctcagtctcccaaagtggtgggactacaagtgtgagccatcatgcctagccatcatatgcatttttaaaattattttttctttaaaaaaatttttttctgtgcccattgacagcagatattatatgcatttttgacaggaataccacaaaagtgatactgtgtctttttcagcgcatcccatcaggagtcatatgatgacagtgaaatttaaaaaaccactttgtttactgaataatttaacaggagtactatttatgtaagatgtgcatataactcttgagcattgcgaaattcttccaaagacttcttctttcatgcagagtaaaagccatgcattttacaatggtgcgtgacctggcgtccaagacccactcctctttgtctctcctcttgctcacagcatttcagccatgttgcctgctggtcctggacctcgctctctgttgtatccacagttttctctgcctgggatgctgctcctttgctggctacatggcctcttccctcaacccctcagagttttgctcaaatacctccttttcagtgatgccttccccactgaaaatgtcagcctgccattctgcaaactcttagctctctctccacttaatttttctccatagtcctcatctccatttatgttccatcctgtttacttatgtttttcattttctgtctcccagtctcctcttcagccccctagactgtaagatccttgaggccagggcttttgtctgttttgctcaccgttgtctcctcaacatctagagcagtacctgccacaagtcaaccctcagtagatacttattttcacaatagcagccccctctctgttcccattctttctctggatatattttgaatagctctgaaccagggctattgaggattcagtggcaagtaagtccagggcccgtttgttcagagagcttgcgctagattgcctgagtcactgttactacagttgtgattagtgcctggtgcagtgccaatgcagtaggtgttcaaaacatgtttgttgagtgaataagtgaattattttcaggcatcttaacgggcagcctgggatgttttttgggttagacatattgggaaggagggatcttcaaatcattgcccagggaataggcctgggccctaaaattcattttagacccaaaattcaggtttcagttgtccgttctgaggaaaccccaaaggacacacaggctggaggctatgaatccccagatgctttacagcctgagttgagatctgctggacaataaaagggcacaggtgacaccttatagattagctccaagggttgccagctgtttgcgtagattgtgttggaactgtcacttctcagggagtggtgtctaactgcgactgctttggctgggatccaggcaagctgtagaagggctggagtcgtttttgctcttctcttcctcattgcacctcccctccaacaaagggtgaatggcaaagtagctggacacagaaaagagattggaattcaatgtaccctgggctacagcaccatccagaaaggaatccactgaaatcacttcaaggagagacagggcatgtcttgtttttttttttaattttttatttttatttatttatttttatttttttgtgagacagggtcttgctctatcacccaggctggagtgcagtgatgtgatcacagctcactgtagccttgacctcctgggctcaagcaatccttctgcctcagcctccttagtagctgggactacaggcatgtatcaccacacttggcttatttttaatttttgtgtagagatggggttttgctatgctgcctgggctggtcttgacctcctgggctcaagcaatcctcttgccttggcctcccaaattactgggattacagatgtgggccactgtgcccagccaggccattgtcttcacagacaaacctctcttattgaagtgcaacatacagaaaagtacacaaaattacaaatgtacatctcaatgagctattgttaaatgaacacactcttgtgtctaccacatgttctctcccattcattacttcctctgtcttccataaatatagccacaattctgacttctaacatcacagatttgttttgtccgtatatatggaatcaaacggtatgcactcttgtgtctgactacttttgctcaacatcttatgagatttatgtatgttattatttgtagcagatcattttcatggctgtatagtattttatcgcatgactatatcatagtttattcaccttttctattattgatgaacctttgggttgctttcaattttgtttttgctattataataatgctgtgatgagccttttgtgcatgcatgtctgttgggtatatctctaggggcagaaccatggagtatgtgtacgtaactctagcagatgctgtcaaactgttttccaaagtggttgaaccaaatagtgcatgagagttccatgctgctttggggccactggcttttggttctgaaggtctgcagatggaaaattaaattgtggaaatgtggagcttggcaagaggccaaaggcaagggaattacagctctgtgatttctctggtatcctgcatgaaattctgacaatagagtcatttttaggagttatgtgagatgcattgttgaattaattaatttaaacggattcatgaagcccttgcttgggttgttcattttgctgttgtgacgtttgaatttcttgtctattctgcatattagttgcctgtaggattcatagtttgcaattttttttcctattctattggttgccttttcactctgtgaattgtttcctttactgtacatgatttttttttagtttgctgtaataccatttgtttattttgcttctgttgcctgtgcttttgaggtcttattcataaactctttccccagcccttattatgctccaagaactatgcaaggttttgtgggggaaacaaagatgaaacagatgtctattctacccttaagaatctttcagacagaggaaaatgggtatgtataattacaactataagggaagatggaaatgctatgtgtcattaacaggcaagatacatttagaataaaaaaggagctaagaagatgaagattccttctaggtaggaacactggggaactggccttgaagaataaataagagtttaggaggtaggtacaaagtagaaggacaattgaagcagaggaaacagctcagaaaagccagggttgcatggggtttggatgggaaacaggaaagggagatgcacttgttatcatggagaaacaatatcacatatgagatgatttggttaactgatgcaaagagtgggacttgggctaggtgagttttgacagaggtaagggagttgcattgcctgaggaagagagttaatatggtcagtatgaagctaaatagagaggaagaaagaaatgggatgtgggccctataggatactttatctatcttatgattttgccctgactagagctggattgccccagtacttttggaatctcactggactctgttcacttagtccccagcaggtacatcttttgatgccttcaccccaagcctggtagcacaagccctagctgagaaaaccttaacatctatttgttggctggtggaaattccacttgctctgagaccctcccgtgctccttctcccaggtgctcaggccccacaccttcctccgactggcaggtccaggttggaggaagctgagctgactcagagctctgcacatgggctcagggctgagcgggactcactgctggatcagattgtctccttcaccatcctctgtacttgtctccttgaccatcctctgttcttcctgaggctgcagtggagttaatcatctgccctctgccctccctttcagagttactagttcacctcatccgttcttaaccacaggaaggtggcccccaaagctgctgagcagtagcaacagcagtggcaggggcccgggggccttcctggactgtggcctctttcctctaaacaattttcacttgttgggtcctcctctatgcctcactaaatgtgtgagaacttgtgttgaagttatgttttcgtagtagcatttcatctcccctatctggtgtgtgtacccctctgggacagaaactgaggtctttctgtatcagtcacaataccctggacatagtgacttgtctacttgccttttcaccgtatctgctttgcacccctgccctggcacccaccccttccaggccgtccatggaaactcattccaaccatcttcctccttcccacactggactgttgggggctgcaggagaaaattcagcaacaaagagcagctacagattcgtaatctccaaccccagctggactctcagtgtcctgggaatcctcatttctggcccacagcttctcctgttccccaaaaggtgggagaattccacaccttcgtcatctctttcaaggccctgttccactatctcagcctccacaaaccaacaacctccttctttaagaaaacagaagcacaagttagggattccaccaaccttgccaacaagtctccagtgtcaatgtacttcatctactcctgtaaatggccacatttgcctctgctgagggcaagagtgttcttgccctgtccttgaccaatactcccctgtgtgctcagggcaccagagcttctttcagaagtcacctgggacctgctgtctgtgaagacatccctcatctttcttcagctgctccttttctgtgggcttcctacctttagtacagtttccttccagttgaaaaatcaaaacaacacctggtgttctctctagctcctttttatttgcagacaaaccagtcttaaatgtataaactaatataatattacataaaaataaaatataacggcctaatttttaaaaagaccccaaaggcagtatagcatgaggactgtagatcacacatttcattctttaagtatttagaagtctatggctgggagtggtggctcacgccagaactttgggaggctgagacgggtggattacttgaggtcaggagttcaagaccagcctggccaatatggcgaaaccctgtctctactaaaaatacaaaaaaaaaaaaaagaatagctgggggtggtggcaggcacctgtagtcccagttactcatgaggctgagacaggagaatcacttgaacctgggaggcagagattgcagtgagccgagatcatgccactgcacaccagtctgggtgacagagcgagactctgtcttaaaacaaacaaacaaacaaagaagtctagacaataacttaaccattttcctgtgtgattcctattcagttttataatagcagagaacaaccttcttctacatagcgctctacattctgatctactggtggattatatgggagtttacgttatttttcattacaccgtatatttatatttaagtaccttttaatacttgtgctacctctcacaattttataaaagataaaaataaagtgaaaccaccactaaacacctgaaaattaaactcatgttccatcaccccattctccaaacctgctccatctttaccagacccataagccacacgtgtgttttgtgttcccttaaccatgctactgctgggtccataatacccaccttccctgttcctttctgcatacaccaggcaggccttggctttttctttcaatggcagctcccacccaccgcctctgggcagccactcctaactctgcagggcagaggaaaacatgctttccttatgcttgcctcacaccctgggcacacctccatagcacattccatattgcatttcagttggctgttttaggtctatcttcctttttcacttttttttttttttttttttttttttaggcagggtcttgctctgtcacccaggctggggtgcagtggtgcagtcatggctcactgcaacccctgcctcccaggcttttctgatatttagctaagagttgggtttagctgagatgagtgaggaaatctacaaattcacttgctatggtaatgtttccacaatgggcaagtcatattttgcttttatcaaagtacatcttagttaatagtcagaacagttgagtgagaggtagtcattactctttttctgcttttttaccaagatacaactcacagctgtgtgcacaaaatttaaatcaacagcttgatgaacttttatatgtgtaagtacatatcaaaactacccacatcaagatgtaacacatttctagcacccagtcattcctttttggcccttcaagttgataacccccctcctgcaagggtaatcacattctaacctctctcaccatatattagtttttccagattttaaactttatatcagtgaaataattcactatgtactttttggagtctagcttcattaatactcatcattgtggtgagatccatccacattattgccaggaaaagtagcttttctttttcattgctgtgtaatattccttataagactataacacgatttatttgctcatctaatcgtgatagacatttgggttttttctcattttgagttattatgactaaagccattattaacactcttgtacatatttttagtggatataaacaccagattttctttttttttgagacggagtttcactcttgttgcccaggctggagtgcaatggcatgatcttggctcactgcaacctccgcctctcagatttaagtgattctcctgcttcagtcttccaagtagctgggattacaggtgtgcactgccacgcccagctaattttttttcttttttttgagatggggtttcaccatgttggccaggctggtctcaaactcctgacctcaggtgatccgcctgcctcgacctcccaaagtgctgggattacaggcatgagccaccatgcctggcccagattttcttgtgtacaaattcttctggatcaaagggtatatgtaagtttagttttagaagataccgtaaaatagttttccaaagtgctggtaccaatttacactctcactagcaataaatgagaatctcagttgctcccatctctgtcaacccttggaattttcacatttatttatttacatttattttcgagaccaagtctcagtctgtcacccaggctggagtacagtggcgtgatcttggctcactgcaacctctgcctcctgggttcaagcaattctcctgcctcagactcccaagaagctggtattacaggcgccaccaccgtgctctgctaatttttgcatttttagtagagatggggtttcaccatgttggccaggctggcctcgaactcctggcctcaagcgatccacccgcctcggcctcccaaagtgctgggattacaggcttgagccgcttcgcccagccttcagacctttaaatgttagctattttggtgggaatgtgaaatctcattattctctgataactaatgttgttgggcacccttatgcatgcctattggctattggatattctctttcctaaagtgcctgcccaagtctgttgctttttttgtcattattgtcatcagtgtattattgatttccagtctattattgtcatcagtctattattgatggaattctttatatactctggatatgagccctttttcaaatgtatgtattgcaaacattttctcccagtctttggcttgctttttcactctctcaatgttgtctttcaccaaacagaagttctaagttttagtgaagtccaatttatcaatattcttttatggttagtgatttatttttgtgtgtgtgtgtcctgttaaagaaacatttgttgtctgggtgcagtggctcatgcctgtaatctcagcgctttgggaggccaaggcgggtggatcacttgagcccaggagttcaagacaagccttggcaacatggtgaaactctatctctaccaaaaatgcaaaaattagccagtctcataatctggtctcaaaataaacataaaaatagattaaaatgtaaaaataaaaaaggaaacatttgtctatctcaagatgtagaagatattctcttgtgctttttcctggaagctttataggtttagctttcatatttaaatttatgatttgttttaaattaatttttgtatatgatatgagggagatatcaaggttttttttccttatagatatcaatttgaccaagcaccatttattgaaaagatcaagtatgtgttggtttgtgtgatattgtgaaatatatatttggttttcaacctcctttcctggcatacaattcctaaaatttttagaaattccgaagtgatgtctttttgtaggctaatgaggtgaccgatggctggcagcctgtaggcagcttcgggataggggccggtcaccagaaagaccaaggcagggttggaatattggactctgagcccgtccccaaccttcaggaaaaggagagggattgaaggttaagttgatcaccgatggccagtggtcaatcattcccatttattgaggcctccataaaaacccaaagaacaaggttcagagagctaaacatgcggaggttcctggagggtggcacgccctgggaaggcatggaaactctgtatcccttcccctacaccttgtcctatgcatctcttcataggtaccctttgtaataacctttataataatccagtgaatgtgtttccctgagttctgtgagccatctagcaaattaattgaacccaaggagggaataacgggaaacccagtttatagctagttggtcagaagcgcaggtaaaacaatctggagcttgcagttggcatctggtggatatctacaggtagatagtgtcagaattgaactgaattagaggacatccagttggtgtccactgaagagctgattgcttgcttggcacgtgggaaactccccacacgttggtcacagaagtcttctgtgttgattgttgtggtgtgaaaccagaggaaaaacagttagtgtttttcccacacacagggtctatttctagactattatattccatcgactacttttcaatccttgcaatactggaatgctatcttaatttctgaagttttacaatatatcttgatattaggtagtgaaaaccttctagctttgttcttcatcaagattgccttggctattctatgtcttttacattttcatataagttttagaatcaacttgttaatttctataaaaataacctgcaataatttttattggaattctattgaatctataaattaatttaggaagaattgacatcttagcaatattaagtcttccaataaaaaccatggtatagtctcctgtttatttagctctttaattttttctcagcaatcttttgttgcaataggtgtataggtcttaaatatttcttcttgaaattatttctatatattttatcttttttgtgctgctgtaaatagtattgttttcaaaatttcatttttatctgtttgtactaatatatagaaataaaaatgatttttgtatattgaccttatatctagcaattttgcaaaactgacttctacactcaaataatttttcatatagtcctcttggtttcctatatacacaggtatatagtttgtgaataatgacagtttcacatattcattttttttttgagatggagttttgctcttgttgcccaggctggagtgcaatggtgccatcttggctcactgcagcctccgcttcccgggttcaagtgattctcctgcctcagcctcccgagtagctgggatttcaggtgactgccacccgcctggctaatttttgtatttttagtagagatggagtttcactgtgttggccaggctggtctcgaactcctgacctcaggtgagctgcccaaagtgctgggattacaggcgtgagccactgcgcccagcctcacatattcatttctaatttttattccctttgactattttccttgttttgttgaactagccatgacctccagtacaatgttgattaaaagaggtaattatggaatcctttttctgttcctgagtttgcagggacatggatgaagctggaagccatcgttctcagcaaactaacacaggaacagaaaaccaaacaccacgtgttctcactcaaagtgggagttgaacaatgagaacatatgggcacagggacgggaatatcacacaccagggcctgttagtgggtgaggggcaaggggagggaggcattaggacaaatacctaatgcatgtggggcttaaaacctagatgatgggttgataggtgcagcaaaccaccatggcacacgtatacctacgtaacaaatctgcatgttctgcatacgtatcccagaacttaaagtaaaacaaaaaaaaaaaaaagaaagagatgggtacaaatgtgaatgtttgttgttttgaacaaacctctccaaccatgtttttcctctgctcccacatcaaaataataacaatcatcaacatagaagacttctgtgaccaaatgcagggaggtggatttctcctcacagcaaactgaataatgtattctgcagtggacaccagctgggtgttctccaattcagttcagacactaactggagagagtgtcagaccacagaggctgggggctcagtccccaacaccacccctccaccacaccagttctaagtctgggcctccagaacttcggaccaaccagcttccagttggggttctcacaaccccctccttgggttcaattaatttgctggagtggctcacataaaccagggaaacatttatgtttgctggtctattataagagatattacaaaggatacagatgaagagatggcatagggcaaggtatgggggaagggacacgaagcttccatgccttccctgggcacactgcatgccaggaatctccagctatctggaggctctccaagcccagtcctcttgggtttttatggagacttcacttcataggcatgaccaacaaccttgtagaaatgtgactggatgaaaagggtatgattccatactaacaggctgagtggagaaacccagcaaggcctgtctgttcagattcttcttggtctctctgtgtagcatttctttctctagaatctgaggcaggaacttctctgaaatgagggtcttttgatttatatcagattagagttgtctacactcagcaatggtgatcttcttgctggtcttgccattcctggacccaaagggctccatgctgtctgcaatattcatgccccctttcaacttgccaaataccacacgcttgccatccatccattcagtctcggcaatgtagatgaaaaactgggaactatttgtgttgggtccagcatttgccatggacaagatgccaagacctgtatgcttcaggatgaagttctcaccatcaaatttcaccccatagatgaacttgccaccagtgccattatggtgtgtgatgtcaacatcctggcacataaattctgcaataatcctgtgagagcaggagctcttgtaaccaaatcatttctctctagtgctcagaacacaaatgttttctgctgtctttggaactttatgtgcaaacagctccaaggagacacggtccaagggttcatggtcaactgctatattaatgaacatggtggggttgactacggttgatagcaagagactctaggtggtgaaggcacctccaaagcaccaggtatatacattttaacacttttatttaatgaatttacttttggctttgctaattttctctattgtgtatttgctttttattttattgaagttagctcttacatttactttctcctttctcctttctctggattatcatcatcatcatcattatttgaattactatttctttttctttggtttcttgagattgaatcttgcattattgacttgcaaactttctttcttttccaatatacaaatttaaagctataaatttccctctaaacactgccttagctatattgcacatttgatactcattatcactttgctctaaatatttcccaaatttcatttgatttattctttgactcatgggtttttagaaatatgtttcttatgttttaaacattcagagattttctggttatttttctgttattgattttttgtttaattctactgtgcttagagggcataattggtatgatttcaatactttgaactttgttgacacttgttttaatgcacagcatatgataatactttggtaactattgcatgtgcacttgaaaagaatatgtattctgcaattgttaggagaattgttttatatataatttatatatatattggtttaatgatcttcaaattcttatagccttattgatttttttgtgtgcttcttgtagcagctagagagacagatgtaataaaactctccaactatagttgtggatttacttctccttttagttctatcaaattttattttatatattttaaacttgttatatgcatagaaactgaagatgattgtttattcctacttaattggttcttttataatgatgacatttccttctatttctgtatattttttatacatcttatgtctttttttgttcattttctccgttattgccttcttttgtatttaattgatatttttgtgctgcatctttttgattcccttctcatttctttttctgtacattttgttattttctcaatggttaccacaggtattacaatgaatacctccaacaatatagtttgaattgatgccaattcagcctcaatactatagaaaactcctatacagctctatccccccacttttattgtcacaaattacatctgtttctattgtttttcacttcttgtgcctgagtttccattttctttatatctaaagaacatcctttggtatttcctttactgcaggcctttttgtgacaaattctttccgtttttaattttttctaaaaatgtctttatttcagcttcatttaaaaaattattactattttttgagacagtctcactttgtcacccaggcaggaggggagtggcaccatcttggctcgctgcagccttgacttcctgggttcaagtgattctcgtgcctcagcctcctgagtagccgggattatgggcgcgtgccaccacgctcagctaacttttgtatttttagtcgagatggggtttgccatgttggccagcctggtctccaactcccgacctcaactgattcacctgcttcagcctcccaaagtgcggggattacaggcatgagccactgcatctgctttcatctttgaagtaccgaaattctagataggcagttattttctttcagcactttaaatatatcattccttggaaaaccaaacaacgtatgttctcactgatacgtgggagttaagctacgaggatgcaaaggcataagaatgatacagtggactttggtgacttgggaggaaaagtgggaggggagtgagggataaaagactataaatagagtgcagtgtatactgctcgggtgatgggtgcaccgactcacaaatcacctctaatgaactttctcttgtaaccaaacaccacctgtaccccaataacctatggaaaaataaaaaaaaaagataccattccatcatctgctttttattatttttgctgaaatgtcagctaagttgtttgttttgtgaagggaatttagttttcccccactctggctattttacgatttttctatttatctttggtttccataatttttttgatgtattgagaggttgtcttttgttcattggtttgttttttttctttttttttttttgagacagagtttcactcttgttgcccaggttggagtgcagtggcgtgatctcggctcactgcaacctccacctcctggattcaagtgattctcctgcctcagcctcccaagtagctgggattacaggtgtgcaccaccatacttggctaatttttgcatttttagcagagatgggattttgtcatattggccaggctggtctcaaactcctgacgtcaggtgatccatccacctgggcctcccaaagtgctgggattacaggcgtgagccaccgtgcccagcttgtcggtttgttttgatcttgcttggggtttgtaacacattttacaaatctatcttgatggcttttgtcagttttgggaaattcttatcttttatctcttttgcttagttcctctttcctctctcgtctccttgctttccaattacacttagtttaggggttttgttttgtttttgctatatctcaaatatcttttacactccttcttgtgtatttttatccttttgtttttctttacttcactctggatattttataacagttttctaattctcttttcaatggcatctaaatggcctttttaacctttcaattgagtttgttttacagttattttacattttatttctgtaattttcattgaattctttaaaaaaaatccaatttcaggtaactattgctgcataatgacctactccaaaatccagtagtttaaaacaactacctatttagttagtgattctgctagttggcaatttgggctgggctcagctaggtggttcttttggtttcctcttgcatcagtcatgcatgtgtggtcagctgccagactggccacgggtggctgattcatttatttattttttattgttttttgagattaggtcttgctctgtcatgcaggctagagtgcagtggcatgatatctcggctcactgcaagctccatctcccgggttcaagcagttctcgtgcctcagactcccaagtagctggggttacaagtgtgtgccaccatgtctggctaatttttgtatcgttagtagagacgaggttttaccatgttggccagggtggtctcgaactcccgaccttgagtgatctgccggccttggcctcccaaagtgctggaattacgggcatgagccaccgcaccaggccagggctagctgatttagaatggccttagctgtgttggcttatctctgtatcatgtgatatcttattctccagcaggctattttaggcttgttcacaggtcagccagatgaggttccaagagaacaagtagaaatgtgcaatgccttttcagatctaggcttagaactagcagaacatcatttttgctgcgtttcatcatgaagaccagcccagttccaagagacagggaaatgaaccccatttcttgataacagaaggagctgtaaagtcacattgcaaggacatggtatttttgcattctatcacgctagttctctgctgaaattcttaaacttatgttttatttccttgaacatattagacatgattactttaaagtttatgactgacaactctattatgtagatgccctgtttgttggtttctgttgtctctattcttctgttggtttttggagatgtttccttttcttatacttcactttggatattgtgtatgaaacattctaggaataatttaatgctctggttgatgttattttcctctagtcataacttatatttgcctctagttggcagccaggttagggctaccagagattccagatcattagttcaatccagggttgtgatgattcaaaattgagcttcagttcctgtgagggctgttcatttctcgttcactcttactctttgggtatagccctctgtggtaccaacctcaacactgatggattttatgtatacccgctttctaataggagggacgtgaacttcatgttctcttagttccttgagttttattgtgagctctgctcagcttctcagccttttagctgccatttatggaatcagaagatgcctccagggaacaacagtcagaaatgctgatctcacctctctgaatttccttcttccagatattggccccataatttttcactgctttataaactctctgataactttaacaatgtgcttttacatgttgttcatttttcttctagctatttttagtgggaggattggttagcatgtcttaacctggattttcattacataattagaattccttcgatgattttttatctcaacaattaaggggatgctgtagaatgaaagtgttctgtttccagatcacaaactctctggagtcaggaatcatgccttatacatgaagaggccctgcctcttcaggggctggattgcagtgggactcagtaaggactgaataattgatgaagacagtatatgtcctccttgtaggtttagtaatgattttttccattcacctttgttctcagggtctttgtgcaatatttggtaggttgacttgttcttataaatagtgctaggatcgtaggagacagagacacagagatgcacagcacagtctctgcttttgagaagcttttggtttgctaatgggcagagccagtacaagtcatataaatataaatgggaacctatgtgttttagtcttaggagcatcaagatcaaagaaacatatttcatcaaacaaatagtattacaagtcctttaattatttacttagtctcttgagaaaatgccagggtgaagctgtggcttggagagactgcattcataatgcactggacatataaaaacccctctgtctcaattgctctcttcttaatagcctccattttaacggagccacttgtaaaactctccccatctcttattttctcttccaaatcctccctgagcctccccaactcacccagagagactttttaatttcctgcacctgctgggccatgccacatagctttattactaaaaatggctgtaggaacttccagttttgtacactgactgcacagaattgctctaggttgtcacacccccatattcattaggtttcatcttgattctttgagaggcaagtgctgggatctgcctgggaagtgtagttttatttttaaaattgttttctagggagaaatttttgtggagactttctgatcactgaaaaactggcaaacatcaataagtaatgaccaaaatccaatgaaccaagtgccacgagagaggattatgtattcagctctgtgagaggatggttgaggggccatgagttcagcttggacggttagtcttcctgggcctgaccattcagaatttccaacagtcactacttgccattagtagttgcctcagcactgcttggagggagtcaccttagatgtggtatttatagcatcatggttaagaatttatcctctcaagccaaactgctgtctttacaaagagtaaacaaataagctccctagcacctgtgctcccagctactagggaggttgagatgggaggatcacctcaagcccaggagttcaaggctgcagtgagctgtgattgcgccactgcactccagcctgggtgacagagtgagaccctgtctctagaaaacaaaacaaaagaaaacaaaaacataacaccaaactgactaggtttcaggctcatcattcttttaactcatcataccttttaacttaaatagttaaaatgtataaagtgtgaaacctgcctgtcacatagtaagtactcaagattttagctattggtctatgggatccctcagactagggacacagagcttggggacaaggggaggcagatggaggggatatgctttaaggtgctcctaggttctgggctcctcatactcatccccacccaattggcttaagggaagtcacatccagctgcccacattgctcaggcctgacactcttcccgctactttcagcttgggttctctttcctaggatgccagggatcagctgaccatgtggttagcatctcgggagtgcctcttcagttacaaccaaacagcatacagacgaaggttgacagcattgcatggaagaagttgctgccctcacaaaatggatttcatcacatattgaagtgggagaatggctctttgccttccaatacttccaatgatagattcagttttatagtcaagaacttgagtcttctcatcaaggcagctcagcagcaggacagtggcctctactgcctggaggtcaccagtatatctggaaaagttcagacagccacgttccaggtttttgtatttggtaagtctccaggactgttcatactgccctctctgattcctataggcctctaagttctgtatttccaatgcctttctgatcagaatctctgcttccagataaagttgagaaaccccgcctacaggggcaggggaagatcctggacagagggagatgccaagtggctctgtcttgcttggtctccagggatggcaatgtgtcctatgcttggtacagagggagcaagctgatccagacagcagggaacctcacctacctggacgaggaggttgacattaatggcactcacacatatacctgcaatgtcagcaatcctgttagctgggaaagccacaccctgaatctcactcaggactgtcagaatgcccatcagggtaagtggaacacactgggctataacaagcgctgaaggtttggaccccgcaaccaggctcatgtgcaagacagatgtggtatgagataaaatcccttggcctcctctcccagtgccttgtagcccttcccagggtagccctggcctccaggcacacagttcctgtaaagctaggcctatcctactctggaaaaaaatgttatccctatttccttctgggagatgcaagcttttcttctgcagagggagggcatagttgtttggtgagtgacagtcctgaaatggctcctgaacattattttcttcctgggagaggctgatggagaactgtcctctcctcttgagtgataactttctccaagccacatagttcaagaggtaactacactgtgcagcagtagcctggagcaggagcatcaggatgaccccagggatacctagatgagttcttgggctgttgcttatgctcatcctaagagttacctgagttaccgttccacaactttttattacataaacagggacttaatgtaccagcagcatgggcattataggaaaaaaaaaccatacagctctcattcataaggaacttatagccaaatggggcaacaaaaataactacttgtggacaaaaaagaaacaagactgaggcaggccgggcgcagtggctccctgtaatcccagcactttgggaggctgaggtgggtggatcacaaggtcaggagtttgagaccagcctggccaacatggtgaaaccctgtctctactaaaaatacaaaaaattagctgggcgtgttggcgggcacctgtaatctcagctactcaggaggctgaggcaggagaattgcttgaacccaggaggcggaggttgcagtgagtcaagatcatgccactgaactaggacactggcttcatcattcagaagctctgtgatctcttagaggtcaggtgtggtggctcacacatgtaatcctagcactttgggaggctgaggcaggtggatcacttgagtccaggtgtttgagaccagcctggacaatatggtgtaatcccatctctatttaaaaaaaaaaaaaaaagaagctctgtgatctctggcagattcattaacctctctgagcctcaattttcttccccccttgagtaaaatgggggtgataataagtacctcacaggattgctgttaagagtaaatgagataatgtttgcaaagagccttgtcagcccttggaacacttaattccttttccttcctcttgttggctggattatatatcaggctacatgtgtgacacaaatcttttaagtagaagttcaaatgaggaagagccatgaaggaaggaatagtggaaaagtgagacggaaaacttgcctgtacaatgagtattttttgagttaaaaacaaaggaatggataaatgtaacatttgttgtgctacatgtccctcagtatccatgacgaattagttccaggacccacctcgcaaccacagatgccaagatccacgaatgtttaagtccctggcataaacaggtgcagtttttgcatataacctatgcacacatccttctgtataccttacttaagtcacctctaaattagttataatgcctgatacaatgtaaatgctatttaaatagttgttatactgtattgtttagggaataatgacaaggaaaaaggcctctacatattcaatacacatgcattttttttccctgaatattctggatccacaattcattgaatccacattgtggaactcaaaactttggagggcaactgtattagatcatgtaattaacccctataggtagataacgttatccccttttacaggtgagaaaatctaagaggctctgaggcatcttccaaaaataagatgacttgagaggcccagagaggttaaataaatagtgcagagctcacagggttagaatttgagccaggcctgtctgatatatctatgctcttggcatcactcagaggaggttaaccaaatgagcaaagagaaaaccttgaccgtgagttctcagagcacgaggcaatcagccacaacacagagaaaagtgggttttgaggcagcccctgcagcaggcaggtgggaaggaagaagagagcgagctgacagctcagttctcacgccttctgtattcctcagaattcagattttggccgtttttggtgatcatcgtgattctaagcgcactgttccttggcacccttgcctgcttctgtgtgtggaggagaaagaggaaggagaagcagtcaggtgagtggaaggtccttagggtggtgctcctgcctgaggccttggatcctgtgactttgtcctgcgtccagtgggatgtgtctgggagcacagcatctccttttcctcaacgagctttggtatgtttgtgtgcgtggtggcggggggcaagcaggttgctaggctctctctcccagttcatgccttctgatcccaatgcgcagatttccctgtagacagctggtttgggaggaggtgtgggaggggcagttcggttgctgcctctgtgctctttggggttcctgggaagagcattaacttgcctcctttctagaaccttttttaaggtttggccatttggggtagaggtgggacctgttagaagcaaaagcccttctggaggtttctgcagctctgctctttgttttcttcctccctcagagaccagtcccaaggaatttttgacaatttacgaagatgtcaaggatctgaaaaccaggagaaatcacgtatgtcatcccggaggctggggtctctctcagctggcttggaaaatgctctttcaatgatggttattcagagcagagggacaaaaaggactgaacgactgtccttttgatgtgaccctcagcccttccccatctatcttttctccacctgcttcctagttctggtgatggaggaaaagaggaaacaaaaggagcagaggagatgaaagggaggctgaaggggcatcttggtgcagaattgcacctgctgagaagggatggagcacaacagaaatcaatgacagaggcagagtgctgctgtggtatttgttgtctgaccacaaattctttttcctaatgagtcagggcttacattcatgagtcccttaatggtgacacaggctgggaagtgtgaccagccaaagcataatagttttgtagctggctcaataggctgcattcacagccttttggaagaagaggcctgagtgtggctgaggtactagagagagtaaccagcctggcacaaagcccaccagcctgagtaggctcctccaggagcctctcgcctgctcttcgcagcaggcaggggccaactctgcctgtcatccaagaattagaagaggaggaaattgcagagggcctgcagatgcccccactgctgtgtctcgcttagggcagatgtggtgacaggcccaggggaaaagctctgatggagcctaccaaactgctggcaggaagtggggcagggtgggtgaagtggggcggaagtgccttctttccactgccccctggcgctttgctgtggagacccagcagcacgcaggaagcacatgtggtggggctcttccgtgctggccacatacgtgaggccctgtgcagcctcgcagagcaggcaagcatcctctcccagatgcctctgggttcagaggctgttagagcagctccccatgcctgtttttttatttttatctttatttatttatttatttttgccccagcagtggctatgggaatgtgaaaaataaagcagtggctattggaatgtgaataataaaaggggactttgtttctctcactgctaccagactctggtacaaattcctgaaagcatgtgaatctacccacagccagtgatgcccgggtgcttgctaaaaataatctatttttccaaaaagaagatgacttgagattaggagaccacaggaggaaaaacaacttagagcaaaggaaacctctttgggattcaggcctattagcttacttcttccgactcaagagctcctccctgcctggcctcagccctctctggcctctccctattgtctcagggctccaatttgaaggcctaaatctcaagtttcatgtggtctcactttgagacccagctctaatctttctagaaacacttcacacgggtctggacgggagagaaaagcaacaaactcctgcagtattttaaaacacaaatgaagttattgacattgtcagatgcccatgactccccagcctctaaggacagctgacagttctctgcttctcttagcttcttcttgcttccaggaattttgcttgcaccttgcctaatgaaccctgctgcctccactggctcccagtagaacccaaactggcaatatgctttcagtggccggcagcatgaaatacctccaccaccgatttcctaaggggtaggaacaagaaaagggaagcaggaagctctgcttcctgctttggcccttgggttcagggctgcacccagcactatagctgcccagggcgctgacttgaggtcaagggcaaggtggcctcaaagatgatctagagagggcttaactgtgtttggtctttgaaatgtttaaactttctgaatttcagtgctctgaggtaaggctcagataacagccctactcagagctctgcaaggaagggtttctaagttactaaaggaaagaaagtgacagcattctctttgagcagggttgctggaacccctcacacctaggtggttccttgctcctgatactaatggttccactccaaactgctcttcttcctgtctcttcccatcttgggaggatcaatgactctccccagtcctgccacctccctcccagtctcctgaaaagccctcttctttgtgctgtttttccccactcaatctaaatctggacagaccgaactgtcgctcatgttaccccatctccatttcttgtgcaggagcaggagcagacttttcctggaggggggagcaccatctactctatgatccagtcccaggtacctctccagtttctctagtccattccatacctatctctggggtttcctaatgcccccctgaaactcacaccattgaatggcagaataagatcttggtgcttctagaatccagaagatagcttggcttcagttgcattaacacattatttgaaaagatccgtgtgatactagagcatcttaacacagctgggaagcctgatgtggacattccttcttcttccgtgtctggcagaaggtctggcccagataaagtctataggagcagaaacctggttaggggactcaacttctgctttcttgccctgctgctgcttctaatacttggggcccttgcactttttatccctattccctattatattcgttttcaggaaagaatgaatctgcattgatctcttttattttattatgacttagcaataatgtccattttcttttcttttaaaacaattttattgtttagagacagggtctctttatttattttttatttccataggtttttttgggaacaggtggcatttggtgtcatgagtcagttctttagtggtgatttgtgagatttttggtatacccgttatgagacaggatctcattctgtctaccaggctgagtgcaatggtagaatcatagcttactgaagccttgaattcccggcctcaagtgatcctcccacctcagcctcctgggtagctaggtctgcaggtgtgtaccactgcacccagctgtattttcttactaaatctcacataacagcctcatgaaaatagttctaatactttagatgtggtctacattccatatcacaatgaggaaaccgagactcaggtcaactgatatctcaaggctacatagctaggtagtggcagagctgagccaaagggtttctgagtctccattgcacctcctcatactccacctcttatattctgggattacagaaattcactcataaactggagaagcatcctttaatactgatggctaaaatgacattgataacccaggctgggacatctctcccaagggaaacactgcctcctggtggccagtaataaaagactttctgataaaaatggctttaaaaaaaagaaaaaaaaaattgagcaccatcttcagtttggtggctgagctgtggggcaaagaaaatctgattataagagcggttgatatctgccagttctctagtttcagccacattgaactccaatgagaggaatttctatcagtgcaagaaagaggtcccctcaaactatggtgttgggtgagaatgacagtcctcctctggagcatcttaaaaggagaatgtttacctgatttagaggacacctggttccagtccagggaagggaggcaagttgccaaagggaggcattgaggtgttgaggaaagagccctggagagtcttgggtttgaattctgcttctactgtgtacgcactgcctgacttgggctatttatccttttggagcctcatttgtggcatggggcaaattatgatcattcttattttataggagtgttaaaagagttagagaagaggccaggcgcggtggctcatgcctgtaatcccaacactttgggaggccgaggcgggcggatcacgaggtcaggggtttgagaccagcctggcccacatggtgaaaccctgtctctaaaaatacaaaaattagctgggcatgatggcaggcacctgtaatcccagctactcaggaggctggggcaggagaattgcctgaacccaggaggcagaggttgcggtgagccaagatcgagacattgcactccagcccaggcaatagagcgaaactcttgtctcaaaaacaaataaacaaaaaaacagttagaggagaatacatgtataagataaatgctcaacaaatagaagctttcattaatgacagagcgagactagcactcaggttgtctgacctcctggctagtccagggctcttttcactaacacttgaagcttccatctgggcagggttgaggaggagaaacggaagagataacctttgtaagattgtgctggatctgtgcttctgaaatgattttatttctcttctcattagtcttctgctcccacgtcacaagaacctgcatatacattatattcattaattcagccttccaggaaggtgagcctcttcccgtggtggtggtggggtgttgttgatgtagatgtgtattttgcatgtgtttgcagtgagagtgtgtgtgcacatcctggcaagttgttctttattgtgtgtatctgagtagcttctgttaaatgactgtatttaaatgtcaatgggccaatgagaaatgccttactggttctgtctggagaaaaataacagcttctagactaagagaacagtagactagatgagtttttgggagtttctgtgggaggtaaaggacagtcagagacagaaaggaggtgctttgcacagagagactacggggtacttagtaggtcagctgaggctatggtgagagatactggaggggtttgcaaggcagggcatattgcctggagctggaggagtagactggatctagagagacacaatcttgaccttcagagaccagagaaaggtcctggccagtcagtcacctgctggtggaggcctctggactgaggcaacccatccttttgcactgaaatccttctccaagctgagttcgtagctctcttgtgtacttggaaacagagttgggtatcctggtacacatggtcattgtttttctcttgtatggaaggggatgggaagagtggtgttcccaaggctggagccacagtgtgaagccagaaagccttaacatggtagtatgggaatttgggagtccacacaactgtggaagtccatgcaggtcagggaccacaggtttgaaggggtttaggacagattttcagacttttcattcaacctccttccaataagccattcaacctacttggatcccatcgtgagagagatttgtttttaattatatgctacaatataaggccatatagatgttcacaggcaccatgttcacctgctttggtgtatgtaaactctatatgctactgaatgtgcctctgaattctagtgtccttgggttggcaattatttatatgcctggattgtttacattaagggtgtgtgtatgcatgcgttgaagagatacatggtttggggcagtatttgcattaggattgcctgagggatatgtgtgtatgtgtatgtgtatgtgtatgtgtatgtgtgtgtgctctgggaatgtgtgtgtgtatatatatacacaaatatgtatatatatgtgtgtgtgtatatatatatatatatacacacacacacacatatgtgtatgggttttaggtgtatgtgggtatggaacagcaaattctgattttggttcagaaatatcatattataggcaaatactgtatatattgtgtcttccctggagaccataaacaccattgttttgctcctagggtgacagattctattcattttctggctgagagtgcctcagaatttttctgggccctgagtctcttttgggacctctcacatcacttaggagtgggagagcacttatctcgaagttaagtattctttaccttctgaatttctagtctggatccaggaagaggaaccacagcccttccttcaatagcactatctatgaagtggtaagattctggaactcctcaatgggtttactgtctgttgcatagccctgaaatctagccatgaaagggtacacttaggaaaagatcattcacacagtctcagagttgtagggaatttagagatcttctaatgcaagtctttgttttagagatgaagacactgaagcccaaggagagtgagggtctgacccaagatcatattgcgtgtttagatatgatacttactgggcagcttgggttttaaattagggccgtccccgagctagttcccaggctgtgggccacaaactggacatctctcctttccaagagtgttcggaggaggggtcagagaggggaagataaaggactctaaatgattttctaaaattagcaagtctttgggagccattccaggacataggtgagcttaatcttcttcaggggtcaacactgttcagagatgaccactgagcctggtggttgaattgattcccatcagagcatttagggactggaaaggagggactcaacatttcttgggggtttattatggataaggtagcctgccagtgtcttcacatggattattttatttagtcctcacagaatgctacaagataggtataattatactttccatttatactcagagaaattaaggcatggagagcatcccccaacctcccccactacccattagcctcatactacacctgagcctccccacctgtggtccaataaagatgctgccattggtcagaagggagggatgggtggctgcctgctggaattcctggcacttcagctatcacccaacattaaagccaactggacaacccagggtcatagagggcactgtgtagacccaggtagcttgtgaggtcatgaaaaagcatatgtggttaagagagtactggaattggagccagaagaactagattcaagtccctcctgcacttcacactagtcgtggatcctgagtaatttgttttgtcactctgagcttcattttttaaatctgtaaaatggggatggcaagtcatacctcacaggattgtgataaggacctcccagtgcaagggtctgaagtttctccttttcttttgcagattggaaagagtcaacctaaagcccagaaccctgctcgattgagccgcaaagagctggagaactttgatgtttattcctagttgctgcagcaattctcacctttcttgcacatcagcatctgctttgggaattggcacagtggatgacggcacaggagtctctatagaacagttcctagtctggagaggatatggaaatttgttcttgttctatattttgttttgaaaatgatgtctaacaaccatgataagagcaaggctgttaaataatatcttccaatttacagatcagacatgaatgggtggaggggttaggttgttcacaaaaggccacattccaagtatttgtaatctagaaagtgttatgtaagtgatgttattagcatcgagattccctccacctgattttcaagctgtcacttgtttccttttctcccctctctgggttgactgcatttctagactctcgccggcccaggcccatcttccaaagcaagaggaaggaatgataatggtgactcaggggaagaagaaacagccctcctctgaaagcctggactgtccggctgtgaactggctggcaggttctgcacgtgggtgggggccagggcctgggctttactcaattgcagagaaaaaactttctccctgcatctcatacctttacctctggccagttggccaccagggggagtgggctgaagggagagtagatggtgcaaagcaagcccatctctaagtagaaaaatcacccagagcacatgctgacctgataactggggtgttgagaccagctttgtccatggtatgatgtttgatttatgaagacgcattgttagaaatccatttggcttcttcatagaagtggcttcccagaggaagaggcctctcagaaaccatgttctatttaagttctgagtcctgatgagtgttccccaggatgcacattgaagggagggctcaggcagctgagggctgagaatgaggcagttggaatctagacactatgctgggttccctgagtcgtcaggccagacatttcaacaaggctgtggggagcagggctgtgactctggctgagcccaggaaagcgacaagggtgaactgggagaggacttactcagagaccccaacaggtgatactgcacaaagcctggttcttcaattttcctaccctgtatctaacataggagtttcatataaaacggtgatatcatgcagatgcagtctgaattccttgcctgaattaaatttatgtatcctctcca

SEQ ID NO: 23 - DNA, 173207 bp, Homo sapiens
gaggagtgagcgagcggcgaccctcacctcgcctcccgcctagctcctgcgcagccagcgggtaccgggagctgcggccagcgccgcttctttcctttccttttctctccgttttccttctccttccccggaggagaaaacaaataaagaagagcaaatagccgggaggcgctcggcatccaggacgttccctcccccgatccaagttggaattagcatcctctcgggggtgagcgcggcgcggggcgggcccgggccggggacccccagcgcagccccctctcggcgggcgggagggcgcggggccgggacgcggggggaattgggaaccgggtgggcggaggaagggggtggggtgggtggggaagtaggaagaggctcggcggcgaggggaggaggtggaagggaagggaggggtagggtggggaggggaggggagcggagggagggtggggagggcgggagggggaggggcggggagctggagagattaagtttttgtgtgtgtgtccctgtgtgcgtgtgtcattttaaggtggctcgggagcggcccggaggagccggcggcggcccgaggagcgagggaccgaaccgggagccatgccgcgctgagggggggccgcacagccgccgccaccgccaccgccgccgggtggggtgggaggggcgggagacgccgccgccgccgcctccagggtgggcgcctttcgccgtggacgccgaccgtccgggacgaggtaaggggggccccgggggagggctggggccgccgccgcccccgcctcacctgcggccgcgggctgggggcgccgcgcccgcgcctcactgcgccactcagggaggaggaggaggaggaggaagagggcgaaggacgcggagccggcatccgaggacatctttggtccgtgcccccggcctcgtgtcccccctcggcgcccgggggtggacgctggctcgggggtccccgcccgcccccgccaccgattgcgcccgctggccgccgtttgcgccaggatttttgttgttgtgatgagagttgatgaatgcgaagtaggcggtcaccttccttcccatcagggttgaaaaaaaaaaaaaaagaaaccccgagcgcggcggcgtccggagggcagcggcggcggcggcggcggcgtctcggcgacggttccctgggcgcccccggctcctgctccctgagcccggtgggtgcgcgcccgggggccgccggcgacccaggccgagcgcgcgacgcgccgcggggacaatacggccggatctccggggaacaggagtccgagcgcgccggggtgcggcgggccttgcgcctacgaggcgagggtggggggggcgcggagaagaggggttccgtggggaagtcggggcgtgagcggctctcggtccccaggggcgctgcccctgccggcgggggatcccgcgcggctccccgggagcgcaagtgaaagacgggaaaggaggcgaagtggaacccttttgttttgccggccccgcattgttggctcctccgggcagccgggccacatctgctgccgctgccgccgccgccactgccgcgcggggctcggcccgccaaagtcgcggcggggcggggggcctgggcgggccgggcggcgggcgcgggcgggggccgggcgggccgggcatttcctctgcccggccgcgctcccgcgggcaccacttcctcctcgcccgccgccgccgggagcccggcccgcccgcctcccccaccttccccgcccgggccgcacttttcgggtggggcgaatcaaaaagaaaaagtttagcaggaggggctggctagggcgcgccccgggcggcagggacccggtgcggcgcagggacagccgggccgccgcggttcctcctcctcccagccctccgcggcgccggacggccccgcgcggccgaggggaagcgcctttctttctctccctcgcgctgcccccagcgccccgggcgagttgggcagaggcgcgcgggagccggggcgtgcctgggcctttctcccgcgggaggcccagcggcgtggcgggtcgcctgcagcccacgccgcgccctggggctcggaggccgcgggcccaagagctcagctcggtcaccgcgggccgcgccgagacacacacgcgcgcacacactccctcccgtggctcgctttccgccggcgacgacggtcgcggacacggagtgagcgtgtgcgcgcgagtgtttgtggttgtcccccctccccccgcccggtactttttccggaggcggcccaagcggcagttggctgcagaggaccccacgtttaggattttatagggaagaggaggaatttttcgtagaaatccccgctctgcgtgctcgtggtggaggctgctggcaatggcctacgtcgtcataccgggcttccttgccctgtccggggtaaacaatccttctgtgtatttacccccttttttctttaaagattggagatcgggttaagttcttagagagtctgatgcgagtggctggaaggatagacaagagaattctattctataaatatgcattgggaatttaaaatgctaaacgccttatttgcaattctgttggatattctagagactggtatatttttatctgacatggataattttgaggggacgttatattttggggaagtttacaaagtgattctttctgcctttctaacttgggcgaaatatatcgactcataccaccctttcaaaaaagatagctttctctactaggtgtttgggttcgaagacagtttaaaaattacctcgtgttcagtacctaagattgctgttttgcctcgagggttttccaagtagaagtgggtagttttcatgtactttgagaattctgaggtttttaacccccccctttttttttaaatataaatcttttctattttgaagtaatgagactttaaaggatcttgtttttgtaatcacttgatttcaaaggatacttcttacagcaattataaagtaatagtcaaaatgctaattagacattttcagtcatagctgctttaatgttgaaacagaatttttttctttagcagagactgtatcgtagagttgaaacgctaaatattcttttgtctggcatcagatctctgaactgctctgacattctcctgaaaaacccctagtgccctttttattgcccccaaaagaaaagttaatgagatggtagatttcaagcaaaaaaacaggccctctttcttgcaaaatatgcttacagttgccattgaagttggatgttagccgtgaatgcacttgcctttaatgaaaccagtttaatcgttcacacttgatcaagtataacatgagcaaacaaaggaaataagccagcatatttctgtagagtgtaagtgttgatgttgggtcaccccctccccctaccctgcccccctgtaaaagggagagagggttgaaggcaaagggaatttatggcgctgattggttttttgtgccccaggggtaggggaccccagttacatccctgtggaaagcagttattagagggaattaaaagatcttgggtttggagcttgttttgaacctgactaggtggtttgggtttaattctttttcctgttcagaaagataaggtaaagaataccgactcccccccgctctttttttttttttaacccccacctgacaaccccctctctaattgtaccttaataagagtctgcaggttgaatgcagaaccctgtgagttatttacggtttcgcctgggagctttgaaactgacccttgaatgggtgttctcctgcggggaggggcagggtgaattaccttttcttaactgattttaaaaagcctcattgtccctaaaaatcatttccttgcacgagttgcaatttatgtgtggaactgaatcatcaattccgtgaagagaaagatattcgtaaagtacatctctctaaagttaagaaagtaagaacgtttggctagttaaaaacaaacactactgccattgtaaaaaacacgccagtgacatacttggtgagatattttggccttttgagagtcggggcacacctgttcctgtccctgccaagttgtgtgtgctttccctgccattgttaatctggtcgtgtacacaagatgaaacggtaaaacttgctatctgtataattattaactagtttgtcagttaccctttcagagaataatcaataacttcagtcttaacttttaaaactccagaaattttactttttaagtctggaaaatgtttcaaagagagattaaatgaaacaaacaaacagcaacaacaaacaacaaaaccagaaaatcaacctacaactttttagtttctgagtagccagctacaaggcaaagaaatgatgaatatatatagtatgtactgaacaagcagtgcactggattttaaaatgatatttttattgttaccattgctgttaaaatacaaacagctcacactatttgaaatccttgagattcacggattgaaaaaaaaccgaaaaggacacctctgagtgagggagtagccctgctgagatctagcaccagaatgccatttgccaacagttcactaacatcatgaatcatttttgaaagcaaagttataccctttgcacttaacgctttccctaaatggaaaaaatttaaagagtttacagcaatggtagaatggcagccccagttgtcatttttttaccactgtcatttccatagagaggggctgtcatcataatgtatgtgcatgcagcctgggtccctctgttaatctatcagggaaaagcagcagccctagtgtcctgtggccctgaatcaggccacaaatatatattcatacagcacatggttgggaagggaaatttatcagttgggcagggcacagctcaggtaatatttccactttgggatggtaggtctgttacacagggtggaacatatttttgtagtaactaaaaaatgggagggcagtgtgtctgtccctggaaaaagaagtatttgtacttaatggaagtgacccatgtggtgaaatctcggggtgtcttttccccagcaatctttctatgaattgctaggggaggaatgcttgtgtgaacttaccctgctgaaaacttttagtgggcacatgaaatgctggaatggatacacttttagagactgtgcggcctggcagatatcagttttctcccttacagctggtaagcatgtcttaatttacgctgctgcaagttaaagttacagcactcctggaaagaagggaaaatgcaaggcttctcctccccacctcatcttttgaagttaattttcattcaagtctgtgtttgatggaatatgtatcaaagacttatgaaagagtttttttttttttaatcctatcttggggtttggaaaattatatttaataattgctaaaaacttaagaaccattttaaaggtgttcagtggcccttttgatcatgatttaatggagagtatccaaaagccatcagtgtgactctaatgatattcacaaattaatgtttgggcataatctggagtttgcttttagctatcattattaatgtttaaagcctaaattatggctgcacttgggcattcagaacttcgcctgtgaaaagaagggctttgcacattgtgtaaaaaaaaaaaggggggattcacaaatgaatacagaatgtacaatagggagagagccaggccattgtttgtgtggaatgttgaccatgggagccaagggctagtttcgccttcattcttctgactgctggagaacacagaaacttcaggagctgtggacgggatgggaaccaggggcacattcatccgtctttgccgggcatggagatttggcctgccccctttccagagtttttcttagaaggtggtcttttctggactgctaaggaacgtcgtgtgctttctcttctcagtaatctgcttttttgaggaacgattttaacggcagatagtaagagttcctcaaggaaagtaaacagaccttttctaccccctcgaaatgtgattttaggaaatgatattcaacttcagaaaggaggcatcttaagtcacaggaggaagttgtgtttatttttactcctctcctgactttaaagtagtttttaatctgttggtagcattagggagaatgcagctaaaataagtttttgctggatgttcatgttttgcgtagctgctgccatttcggaaaaagctcctcccccattcacaaagcccttctccttccacgtgggagccgaggtcccaaagtggaaccaactctgtagcttaagggaggtgcattcctggcccctcactttctaaccctcaccttaagtggaatatgtagataatatgtagatcattaaccattgttggtgtctgaagcctgttcagtttttttagcaacgacactcggtgagaaccagttgtagtttgcatgtgtatatgcctagtccctccctcagtgaatgttttagaaagtgatctgctttagctgtttacctaactaaatttaacagatggttgcctagagttggcttaatattcacaaaaattgtgatgaaatggttgggatcttatgaatgggacaagtgatgattttgtttctatagagaattgtgacttttgtcctaggtaataatagagacttcgtttttcccaaagatcggttggtgtttaaaggatgggaaccctgaatagctgctgttgtctgcccctgatcctggtggtggccagccttgcctttggttttgttgccttctgtgagtccagaaaagccctggaggcaggggtgaggggggagagggagggctgggcttttcatccgtggggttctaaaaatccttctcatttataaaatacaaaaatacttaccttccattgtattgctgatttgtgcttcctccaaagctctcctctgatcagcagaaatgtgcttcttgcattaaaacaaatccttaattatgactaaaagaaactgtcagctgccttaaagattgtctggaaatagtggcaatatttctgtgtctcattccagcccacgttgtggcagaagcctggaagggccacgttaaaggatgtgtcacagagacagtgtgtgtaggtcttcctgcagcacaagcaagctcagggcttgtaaagtccagcttatcgtggctgtgctccagccatgcctgaaatctggcctccagcaatctgtcccgtcccaggacaaacaaaaactttattatggagtcatggaacctgaggaagtttctctggaaggaaccgaagacctagaccgtggagggagatcaactcctctggcctaatggggcttttctttttccaagatggaatttaaaaatctcatctataaaatgaggctagcaaagaatcattttatggtgtaagtggccagaatctaacctggaagtgatagtattgtacctgccgcaggtgtgtgtgtggcagcgggagggtggagaggggaaatgagaggagaagagtttggaggggaaaacagagcattcgaggtttctctgctggagggggtgaaaggccaggagtttgtgcacctttccttttaaatgagctctagctgtgagtttattattttgctgatggatggtctttcgtgcagtctagaagtgcaaacacagtcggcttatccgctgcttgttcaggtccagggagaccaagggaacgggtgggggcagtgcttgcaaatccatctggatcctggacaccccacttggtgttgctgcagccagctcccaggcctgcccacctggagtacagccagcgccagcagcgggcagggcccgagagagctcttaaagccatgtcccaggaacggttgagggaactgagaatgttcagcctggagtggagacacccctgggaagcccaacattgtcctctgtgcggtcatgtggccttactctgctcggaacagggaggccttgctgttggagctgccgggccagatgggctgcgtgggctcctggcacaggcagaacttggctgaccattggctcccagtgccagccaaggctctgcaaacacccgagaccctgatggagactcaggctttgggagcacctcctaatgagctggggaggatactgtgttttcttcccagtggggggtgaccaataatcttaaagttttttccctttctccagacgttcagctgtggtccgcactctggattgctctatctgccctgcggactggatagaggctcagcgtagatgcccagctgacctgacatttcctacccatatttcctagtgtttcaggagcaggcagagacagacctgattcctttatctcggggctttcagattacggaatagaagtcacactaggagggcaatcaataaagagtatattttgctgtacagataccaatatgcacatataagtgcctacaagtaaaatctgggaatgtttttgatcttaaaaacatttcacagtcattaatcttcacgacgctcctgcgggctgggtaaatagagcaattcctattttatgccaggaagaaatattgaattgcctcccccaagtcataaagaggctgtttttcctccttgttcctgtgactcgcggtgtggggggcctggggcgcctggaacccctgcgatccgctcagactgactccaggacgacttccggtgtcctgcgcgaccttctgttgcggggagcgccagtccgccacacctggccgcgctctacctggagggggcggggtctcctgcatttcccggaccgcgggggtgccccaccctgctgcaaggacgggcctcctggcgtccgggcttctggggtcccggggtcccggggttcctggctcccgagccccaggtgaagccccctccatccctggggttcgcccctctcctcccggcgggtggacctggaggccccgcccccgcgggccagaacacctggcggcgcggccccgccccagctgtgccctcttccccccgcagggcacttggcggccccaccctggcccctccgcgggccgcggtatctgacacccccgggcccccccacctcgcgcctcgcctttacacttgtaaatggagccgcttcccgccgcggggaagtcgttgagaggtgtgagaatgggccctgccccctccccccgctccgtgcccacttcctccttcctcccgctggcctttgtgctgggcggggccgctcggacccggggcggcgggggtccagctagacgccgcctcaagccagcagggtcgccggcccctctccggtccgcgaggccccggcaaggtaggagcctcgagaccacgcgggacaccaggttggcccccagcccgcactcgaggctcagagcaggggcggggacctggttgcaccaggccagagccgcctccaccccgcagcggtcgcggactccgggcactcatggggactcctggggtcgtggtgagtggtgaggttcgttgattgactgcgcgatggtggctgagttgcaagcaaacggtaaacagcggcatcatttccacttgaccggcttgggatctcgtctcctgggcagtgtttgggggtgaccacggttcttggataaccttcgaatctgggtgttttccttgtagtacaaatagcgcagtggcagttgctgtgggaaacagcgagggccactgagaccttcagcagaactccacgtcgaggacgagtgacatttgcgcgcctctgctgcgttctctgctgttcaccccggcggctcccaacacctgaagcctggcgaggcatgtgactagaggttgtccgagcgcagagtggtaggacggtgcgatctggcccgtttcgtcttgccctcgtcttctccatggaggaatttctgtgttcgcctctatgttttgcagacttaatttggtgctccagaaacttatgcagccattcaagtgcgctctacctgttattcaagtaactagagagcaaccatttcttgagcacttacttagtgtctggcactagctcgctgggccattgtgtgttgttgcgttgccctgactcttcattggtaaaacagtgactaactatcacctgtgcctctgcgaggacagcgctgtgcttggccagggctggagagccgatctcaaggcaggtgtctggccttttcctggacatagtgagtctgtgatccagagtctgacccacgtattcaacggggcctgcctcaggcttccaaacaggagccaggctgttgtgaatattcactccaaaagtgcagtgaatgtaaaacatcctagagcaggaagtgaggcaggccccgttgaatacgtgggtcagactctggatcacagactcactatgtccgggaaaaggccagacacctgccttgagatcggctctccagccctggccaagcacagcgctgtcctcgcagaggcacaggtgatagttagtcactgttttaccaatgaagagtcagggccagggagcttaggtaattaagtctggctagttactaccaacttcgcctggctctggcttctctgtggctgaccgaggcttcttgtggcctttgactgggacacgggaatgtctggggatggctttgccacactaaccaagactagactccttctttcctcccaagctgtttctcccttgccctcatctgtgtgtctctgatgcagcaccaccccacactccaagaatgcatgggcacactctcctggggttatgtgtgtagctttcacagtgcttagggtttcatgtggtaaaattggatttagtggccaggtatcatttcatcaataggtaagaccatgtttgtggtctgggatagtgtgatctcagttgccctccaccccccatctccctcgagggagggcttgggtccatgggatgcacccctccccaactctggttgcctctggcattcaactggagccatgtgcacacctgaaataggatctggtttgtgggttccacgttggggagttgggggtcaagagacagggaagatgcttaggatttctcctaactgtgatagtctgtttgcaccactcctgtgaaaaccagggagaaactaggttttgccgggtgaacttcctttgggtcgctcccctgcatccgtgtggtgtgggccttagaaaggaatttgaattaatactcctgaacaaagggaacagccttcttttcaaagaggctatcagagaactgacagggaatggcacagagttgggtgtgtcttcaaatccagagaccagccccgctccaccggaagagtacccggagcaggtgatgcgggagctcccaggttgaccttggctttccatagagggtaaggtccccacaaggtgaaggttttcctgaaaaacaggcttttctttataagattaccttcctattctacaacccttctcttctttttgtgaacacgtgtgtacacttgtgagcacatgtgtattctggaaatccttggtttccgctggggctctggtggggccgggggtggtgtggatgttgggtgccccccgcctccatcttggcctttggattctgctctgtcttgtggatgactcaaggaagtgctgggaggagtctcttgacaaatcagtcatgtgagtcccggtgtcctggctcacctccagcttgggtatgaatagagtcagcccattttaagtgccccctgcagtttttaaacaggtctccttccacttcactccacctggaagagggtggtggggccaggatcatccctgggccagccctctcctttctgtggtgcctcactgggacactgagaagggggaagctgctttctcagaggctgttgcttggaaagtggcatctaagcatgagaatgactgcggcgtgcaggttcccatgaatggtcatttcctgtgagccgggccttgtgagtggtcttccagagcccatgtcgtgtctatggtgtgtcccctgtcctgttccaggtttcagggatcctttgcgctgggcagaagatccactgagctggcatccaggttcctccagcagaacacggcgcagtggtggacctgccgcagctctgaggccagcgagccagttttccccagcaccctgtttcccagccctagcatcttcagagtgtccattctcctcgctcctccacggcgcatgcttttcactcagggttgaggattctttttcctccacttgcacacatccttctcatttctcagctaagcctgggattaagaatgaggcttcaagtgacaaaagccaggagatttcacaattaaagttggaattgtgtctgcagtgatgtcttcctcagcatttaaggaaggccttgaatagtgggtaatatttttctatcctaaattggccacatggctccaaatagtgggcaaaggaagacactcctgtggtaaattcgagaatgtcttagttgaggctctcatgtccgtagaggatgaagggaggggggttatgactcaacccagttgtgcttttgggtccctggttgtgtcccagtcaggcccgagagcttagaagcaaatcccgtatgttacttggcccctcagagcagtcttttaaaatatttctcagcaaggaagcttaaaaaggagtttactttcctaattctcttttgttttctagagcagcgggcaaggtgggagggagagcctgggttcgctgtggttagtgggaagggggctgcagcagcacatggaccacctttttggtcacgcctgtagctgggagttttgcaacctggtggttacttggcatgtcagggtcctggctcagatccaaagttttgctctaggggccccggcagcgcactttgaaagcactgagctaactgctgtgctcactttggtggctggtgaccagagaggtcccactggaaggtcgtgaatgtctttcttcctttcaaacactgaggctcggcccaaggagagatggtcctgccctcctagagcttagtagaggcaaaacaaggaagtgtggcaaagaagggatggaaagaaatgctggacttctctcccacactgggaggcctttgcaaagggcttcggtttctgaatctgtaaaatgagggtaaggagagggtgtgttgtaaggattcaatgaagtagtgtttctaaagcctttagaactggcctgacgtaccgtatgtgtttgttagaatttttttttttcccgagatgggggtttcaccgtgtcgccgaggcttggagtgcagtggcgcaatcacggctgactgcggcctcgacctcccgggttcaagcaattttcccatctcagcctcccaagtaggtgggactacaggtacagggcaccacacctggctagtttctgtattttttgtagagatggggtttgccatgttgcccggactgctcatgaactcctgagctcaagtaatcctccctccttggcctcccaaaagtgttaggattacaggtgtgagctgccaagcctgtcatggtgctatgttaaaaatacctggaagatgtcgtgccctgtggtagggaaggggagtggctggtggggctggcttagtttgggagcagccgtcttctttctcattgattcctggggcccaaagcaatgaactgaaaactgttcacgaggttaattttagtctgtgggatgttactacgtattaggtcactccaagaaacgctcagtaaaatatttactttctatttaagacctactttctcttcctggagaaggaagaaaaaaactgccttgcctgatgggcagccagggtgggggcccagtgctgccccagccaccctgcccaggtgaagcctgttgagaagggtcgctcaggtttgaattctcctctactgaggcctcagtacataaaccacagtgaacgtgggcatgacaggccacattccgaggagcatatttgttgaggaaaaggaactgtgtctgcccttccctctgtgcacacgtcatcatcatagctcccttcaccctcccaggtccctgaggaatgggtgcgtttgccggtcagtgaccagggctgtcgacttgcttggtggcatcctgtttggtttcttgtgggtgctcagtcagcagcagctgtggtaactggaccaggtgcagctgggtggcagatctgctgtgatgtttgagcatgttcctgaccccaggccctggcaatggggtggtaattaatcatgtcctcctaggatattcattcacagatactgactgagcacccactaggggccaggcacagtacgcatgtgcgtacagcatcaccaaatgtcttctgattgaaatgttcaaatatcttttctccacccagccagtgttaactgctctgtgcttcctgtggggctccaggtgtgaatagtaggtcatgtgcgtgaaatggcaaggtggggtaaggaaggtgcctgtccggcagttagtttgtcaccttcagagtgggctggtcatttcatggaccagcagtttctttggattcaactcatgctattaaaaaatctcacttggaggccaggtggggtggctcatgcctataaccccagcactttgggaggctgaggcaggtggatcacctaagatcaggagtttgagaccagcctggccaacatggcaaaaaccctgtctctactaaaaatacaaaaaattagccatgcgtggtggcgcgcacctgtaatcctagctatttgggagtctgaggcaggagaattgcttgaactctggagacagaggttgcagtaagccaagatcgtgccattgcactccagcctgggcaacagagcaagacgctgtctccaaaaaaaaaaaaaaatctcacttagggccgggcatggtggctcacacctataatcctagcactttgagaggccgaggcaggccagtcacctgaggtcaggagttcaagaccagcctggccaacatggcaaaaccctgtctcttctaattagttttggagaaattgattttgtagattatattttagtctcttctagaaatacaaaaattagccaggtatggtggttggcacctgtaattccagctaatcgggaggctgaggcaggagaatcacttgaacctgggaggcagaggttgcagtgagtcgagatcatcccattgcactccagcgtgggcaacaaaagcaaaactctgtctcaaattaaaaaaaaaaaaaaatctcacttggaaaagcaaaatggtccttgaaaatgcccttgggaaaccacccatgctggaatgcaagggcatctcagctggccagggaccaggggtctggggccagaatgtcatattcttcaattgcaaatcctggagagtgtgcacaatgaataagatgtgggaagtgctcccacgctagctgtttgttaccattattattattagggacggtggtgctggtggtggtggtggtgatagtagtaggattcatggcaatcccagtagttatggtggcgtgaatgtcattgagaaagacaaatcctcccgtcaactgtgccttcttcttcctagcagggagtggctgtttgtgccctgttttatcaggagggagcagataagtgctagcaaccttctctggccccctgccgtgccctgccctaccctgccccaagggacagcagatacctttaatactacgaagcttgggtgggcttggtggttttcacgagtgactcagtcagtccccagagaggccctggtacctggggttgggggtgctcaaaaggttggcttctggagcaggggcgtccccaaggcacccctggccaggagtctcctgagggccccacccttcgtcccgatggagaagccctaacatctgtatttttagccacctcctccagggggtgcctgatgcagccagcccgaaactgccaacagcagcacacagactggctttcttcaaaaacaaaccactcccccaacacacacccacacactcgagtctagttattgaacatttggcatgaaaaatggttgaaagaagattttatataactcaaataacccactaaattatttgaaacttggaatatggatttctgctgtactcatcctcattctttgaagagggattctccaccctccaacattaccaggcatttctaggaaggcagaggaaatttcctgggtgtctgataaaattggagctagttccgtattcagatgcacttgacatttcactcttgaccgggcagcagtgtgtattgagatgaggctgggcagtgtcagagcatacctgctagaaaagaaattggttttgcagattatattttagtaaaatctgaactgctcagtgaagcacactattactatctatgtacacaagtcaaagatggatgccacagagtcgatgtttttaacattggcccgtgtgagcaagaacatggatcagcaaaaggtgcatttacttcccactgcaggcaaatatgcttaaccttcaggagcgcccccgaggccctcacttgtgcctctagcctgtttcatcatgatgcaagcggatttgggagtgatacctgctgttttagaactgagagtgaactcgttttgtggcaaatcctttttatcttgatcggggaatttattaattagtaggcttcagcgaggctggtaacctagcttgtttctgtttgcagaagtactttgttatacattggcttattttatttttagtaacaaccctgttgtgaggcagtgcgattatttcccacttgaggaattggcaagccgcataggctgggctcacagttaattaatgatcgagcgagatccgaactggttctcctccaccaataccaggccgtccagagaatggttgtgtattcacatgaccccattctagggatgagcgggtgggtgcaaattcgaaggccagaagggaagcaggagaatccagtttcaagagtctggagcctttggtgggagtcccccgggttgaaaggtgaacttgaaagagcatccacgggtgtccttagatgaagaaggatttaagggactctgtttgccccttgatatgaggtttgtaactggggtcttgagcagaaaggaattgctcttcttggtttgagtgactgctttctggggagcgtctgggtgctttttgagttgcatgcagagccatttatggtgagagaaattatgacctgactaattggcccagggctaggtgttttggggctctgcactgaggcctctgtgcaaggagcttgtctgcttgaatatggaaagtgatagtctttggggccctggcagtttcttttggggccgcttttggacttgagttagcaaagaaatgactttatgatttatggtgtttatgaagaatacctatctgttttcacatagacatcttaatagagattaaatacaaaataaagtggaatgcatgaacggagatattcccataagcaatattgtagttttaggcagtgtaattatgttttgtacacttcccgattaagcagttatgcattactggggaaactaccttttagagatttagaaaagctttagaatttagtaaatcaaataaaaataggtatacaatattttagacatagggtttcaacatgttacatggtgtgataatgcagtgccattgaggtgaattttttctttttttgaaatggaggctcactctgtagcccaggctggagtgcagtggcgagttctccgctcactgcaacctctgcctcccgggttcaagcagttctcctttctcagcctcctgagtaggtgggattacagcactcccagctaatttttgtattttttagtagagacaggttttcaccatgttggtcaggctggtcttgaactcctgacctcaggtggtcggcctgcctcagcctcccaaagtgctgggattacaggtgtgagccaacacacccggccggctgaggcgaatttgcttcttctgaacattgcctgtggaatgaaggtgcacccctactgtgtgcgggatgtcgtgggggggctgccgggctacagggaagaagagcaaggagggtttatctggagttcagcaaaacagtggtggatttccgcgagctggggtgggcagaggtggccacattaggtttggagttaggctgaagggggtgtgctgagggtaaatgtgggagagggaacccaaggtaggagcctttcaagctcgcgtgtcctttcagctcccatgtcctggccactaaaccacgggaggtaacgaaatgattttccctgagtaaaccatctgaagcggagctgcatctcaggcagcctctgcgagcatgtgcttcacagaatccttcctcctggtgtcttctgggtgttgctgatttcaaggaagcctggtggggtgtgtgctggctcagccacccctcagttgcaaagctcttgggggccgcagaggatttcacagttcactgcataaagcaagtcatttaattttatcatttgctttttgagaaggatcaagttttcaaaatcctatgtagaaataacttatatacagtaaaacaccctttagcatgcagttctgcaagtcttgacgatctaggcgtcgccaccgggtggttgcggaaccatcccatcaccgaggaaagttctctgtgctcctatggagttcctgcctccccgccctgactcccagcctccagccaccactaaggaaatcactcctttttgatagtagaagggccagcctaggaagtgcgaggagtttggtagatgctggtgtgagaggccagtaatttccaggacatttgtaatatccaaggattatgcatgagccccaggggtgctctggtcacagcagatggacttggcttggatgacacccctcctctccccagtgccatcctagggatgcctgagactccaggagcttggctcgtctggacaggtcggaccaaaagccagtcactgcagtcttgagtcgtgtctgaaaccagcagataaccacctcctccgcaaagtaggcaaaccgcccccgtcccctgcaaacccaagagtgggcagttctgggccacacctgcaggccctggtgcatctaaggccatgctccctgggctccccagggacactcacaacagctgcctctccacactgtgtcccaccagcccctcttggaaagtgcctgggaacaggtgcctcttcgtccgccatagccgctggctccaggtccagagggactgtgagtgactgccaggccagggccgctttctcctttctctgtgggggaagtggctttggagggagccgggcagtgtgctaaccgtgtgcatgtcgtgtgtttgccgcgtgctcactgtgtacttgctgtgtgcttgctgtgtatttactgtgtgcttgccatgtgcttactgtgtgctcgctgtgtacctgctgtgcatttgccatgtacttgctgagtgtttaccgtgtgcttactgtgtgctcgctgtgtacctgctgtgtatttgccatgtacttgccgtgtgtttactgtgtgcttgccatgtgcttactgtgtgctgtctccctgcttcctgttccgtgctcctgtgacttctgggtggtctggggtggttgagcgccctcaggtccccatttgttttcctgaaggtagagaccagtcaggatggccacctttttgtggtcaagaagggtggtttgtggaaagcccagaggaatgagagcttctgaggtggggaaggtcagctgccccgaggctggtgccggccccgagggtagatggccatgcttgcagtcctgggctccactttcaaccctgccagctccttatgcgtcaaataggacgctagtcactagttcctctcacaggaggaggtaatgagaaggcgctggagacttgtgcccaggtgcccagcagaggagatgcttggcaggaagtccctattgcactctgggatataagctgcaactgactcattgcctcatggtttttgtttttatttttatttattctttttttttttttgacagagtctcactctgttacccaggctggagtgcagtggtgtgatctcagctcactgcagcctctcctctgcctcccaggttcaagcgattctcctgtctcagcctcccgagtagccgggattacagccagtctgtcaggcctggctaatttttgtatttttagtagagatggggtttcaccatgttggccaggctggtctcaaactcctgacctcaagtgatctgcctgtctcggcctcccaaagtgctgggtatgcaggtgtgagccaccatgcccagccacgtcatggtttttaatattctttttattgtttttttgacacagggtcacactgtcacccatgctgcagtgcagtggtgtgatcttggctcactgcaacctccaccttctgggttcaagtgattttcctgcctcagcctcctgagtagctgagatgataggcacccaccaccatgtccagctaatttttatattttttgtagaaatgggcttttgccatgttagccaggctggtctcgaactcctgacctcaggtgatccacccaccttggcctcccaaagtgctgagattacaggcgtgagccactgcacccggcccttgatattattttctttcagttgggagaaacttgaaatgagtcttggaatttataaaattgttaagtggggatcactgcatttgctaattttctggtcgttgcccgaaatgtcctttcggagctcattctttgtccccttccctcatcacatcagtcaggctgagggcaggtttaagcggcagtcatcgtgattggccagccctgactggcattcccgtgatctcggtgcatcttgtatgcgtgcatttgcagtatgagaaaaccctttgatgcctttgagctcagactaaatgtgaccttgattcctggcctgaaattaatgtctaagcattcttggcttcttctgggtggtcgtctgtgaacaaactgccatgcagcgagtgtgatggaaacataccctccaaagacatacatagcttagcagatttcagcggggcttcccagtgtagtgtgaggacacttgggtacatggggttagtagctgaaaggtgggtggacaccccatcgtgtctttattaagggttcagggacagttcagcaagggttggggaaggggtgtgctagacgctgagtggaagttgcgaatgtgtgtggccaccggtctgctttcggatggtgagagcaaagttctttactgtctggaaaggtgatctggggaccttttcacaggtcaccagccacctgtgctctgtgatgtgcagctgtgagcacagtagggtcgcagttctaggcagccacaaggcctcatggtgtcctggatacaggatgctttcccagaacccttctggggctccacatctatctccacactttgggtggggaagttgcttcccttgggtggatccaaaaattccagctgacttggagggaagtgagttgagagcccctccagcggtgcttgctcaggtgagtagcttttgctattacatgcccaggcccagctggcctagactggaagctcccagagtccaaaaaacaggggctaatgaacagtcgagaaaaaaacaaggcagacagtcttttaggggtgtgcagtattaaatcactttgaaaggggaccacttaagaaaatcctctgccctcattcaagaatattagaaatacattaatttggtggaataattataatagtagctaccatcttttttttttttttttttttttgagacagtctagctctgtcacccaggctgtacagtgattgtacagtggtgcaatctcggctcactggaacctctgcctcctggtttgaagcaattcatgcctcaacctcccatgtagctgggattacgggtgtgcgccaccacacccggctaaattttgtattttagtagagacagggcttcaccatgttggccaggctgctctcgaactcctggcctcaagtaatctccccacctcagcttcccaaagtgctgggattacaggcgtgagccacctcgcctggctaatagtatctactgtctgttgagtgccaggaatgtgccaagcagggaagatggagatgtatttggtagatgcataatagtaatggctaatgcaccactcacaggctagagacaaagtagactcagagaagctcagtgactttcccaggaacacacagctctttggcagctgctgtatggaaaccacagtgggactcatcagaagccggttcctttgcacagttagccgagtgaagagacggacgggcacaggtatgtttggagttcttaagttcgtcatcttgcacccaagaatcaaggtcgcagggtgaaactctgtagttctggagcctgaaaggcatttgacatcctggctggaaacatacatttttgttttacatttattcgggtagtggtttgctggtctgtttttttttttttttttaaccatttggcttggagaaattttccctttggttatggtaattaccctttcctgatatgtaaattgattacagcggctctttccaatcttacacatttgattatccacgagcctccttctctgcctcttagttaatcttatttttagcacagtccttgaaacctcagcgtgagactgtccatcttccgctgtttctgaactgccgaaggtcattttcaccagccccaccaaacgcggatgtgtttcaagtcaaacacagccatttgaaccagtttcaaacagttgcctttcaagtgtcagcgtggtggggacaggacctgccgcatgaggtccgtgttgcttgggatagtctcgaatcacccagcgtgactccgttggctcccttggttcagtcggctccaggatgagtgcacttgaccagaagctccggcgacactgagattataagggagccaggtgagcggaggctgcgttgtggacaccagccaagtctgggtgggaggaggcaccgggacctatcagcaacctgccctggactttgtttcctcatgtgtgtgtctagggctttgcggatgatttgctccagatggaattaatgctgcagttgttagaagagcatctctggctccgcttctgaagctaatcaccacctctgtttttgtaagttagtgagaggagcgtggctggctatgagggtgcagaggtgcccctcccgcggtcccctggggtcttctctgcatctgagtcttctcagaggccacgtgagtgagtagccccagtggactccggatgttttgtgagccttacctcgataagaataaaaacgttttggtgtgtgatttgatttgtttgctagaagattagtacaaaagcaggaaggaaaaagaacgtggtggaggtgattgctagaggctggcagaaggttatttacggatttttgctgacagtccttgttgaaaggaattccctgtgagatttatgaagcctttccaatttattgtctttccaagtaaggtaagcaaataaataagttattctattttattataaacacagccaatgtaaaattaaaaataagaggaaatggggctccattttttcagcctagtgtgtttcaggaaagcatcttggagaggctttttgttttgtttttggctccagcacattgtgcatttaaaagataaagtcggtgccttgatgttgtatgtgcaggtcaccatccttggagggaactggttgcagccttggtggggttgacaagatggtgaggacagaggagctgggatattcaggaccagcccaccagagtcaccagggactcccaggccccttgggaaataaggctgaggggttcccgagactctgctctgggtttggccacagccgctgcccccagaagggactcttgactcctgaggcccacgtcctagcaaactggtgacatcttcctgcatccttcttcctgttgtcttgatttctttgtctcttctccttaaactcagaaattgttggtgctttcagtatcttggcgaattgtgattttgttgatacagatgtgtaaggacccacatgggaaatttagatttttaggtaaagaacaagcaggaatatgagaccttgtcgtaaacaaacttctcgttttcggcggtgatgtcagtgctgaagatttgggtgggtcaggtttggtgacctgtgtcccaccaaaggcagctcctgctcctgacacgagcccggagcccatttgaaatcgctcccggctctttcaaggccctgggcaacgccatcagggaaacatcctgttaccattttgggagaatgttttacgtctctgcccctagatgtccctgtgctagtgaagctgttttggggggactaataggcagcgtttggacggtgtcttgtaactgtcaactgatgacttcaagttcgttggcccctgctgtgtagtaggtgcatgttgaagatagagtgagtcacattctctgcaagggtttgttttaggagcaaaagaggcctaagtagggaggcttggaaggtgctgagggcataattcctgcaagaatgggctccatggggttcattttctttctttcccacatcctccacagtaccttgtcccactcctataggcacacaaaagaggagggcctttcttcaactcaaggctaatgagctgggcaccaggggttagggtgggggaacagtgtggccgatgcttttctggagtggtggcctgaacaagcctgacctgctcctgcctgcaaggagctgaccacccaaccagagaacactgggcaggcgatcaagctgggtgagccagacagggggatgtgtctggggcctggggagccccacccatgcaccctgaggtcagggctggcctttcacaggaggtaggctgtgagctgtgagggtgaggggccagcctgggcctccctcccagctcaccctcccctaggaggccgccccctgcctgggtccctccagccccttcgttctcatccttatctggatctgagaatcacctggagagctttgaaaaaagatcccagcttaatcctacccccaggttctgagtgtgtggtccacagtggcatctgccttggtaataaaaagttcccaggtgactctaatgaacaaccaggtagggaaccactgcccagccagcactcctcagctgaggccacttgtcctgttctgctcgtgggccggaagggatgggctggagaatcaggtaagtcctaacttcgctgccccacagactgggagcagggtcagagggcagaaggctgccctgggaggccgacttcttaaatgcacacctgactgacaggtacgctcctgctgtggggccaggcaggagagcagcacaggggcacccagggccacacaccgagaagtgtcccgagtggtgagcccagtgtggcctggcttcccatcggcaggtgagggtcatctttcagggctgtttcacttcctcaaaagaatgcagtggaatgagctccatagggtgaggtgcctgtgtgcgtggggatggagaggagggctagctgctgggatgccagaaatgaagggaggctgggatcttcctgccttggtccatgtgtagctggaaggagaaagcagccgttgcctaggagacaaagctggagggcttgactcagactatggacctcttgaggcttcctgcctgggtgggggatcagcccaggaaccccacgaggcgatgggggatgggatggggacggtcatatatgcatttctatagaaaaagaatctggctttccagtgtctcaagggattccgggaccttacatttttttcggagccctcagatgggaatccttggcctacaaaggtgggaggctgtcttgtggacagtagggagagagggtggtggagcgggtgctgcagggaacaaaggacacctggaggcattcctgggcattggcttccttcctggtggttgggcttttgtagaaggcagagtcagggagagactggggacttggtttcctcccagggtgcaggaggaagtaaacctaacagtgatacctggatcaagaaggggctcccctctagcccagcgcagcgagtgggggcgcaccaaggcatccatgcacaatgtagccttgccgctgcctatgacgggaaggtttgaggttgtgaacgtcggctaaggtccccgggggttggctgttgggatgaacgtgggttctagtattaacgtgggttttagtattattgagggttgagtataccgggggcagggggcagggggcaggaggcaggaggagctaagcagcagggtaggtggagtggggagggctatgcctgactccctctccaggctgggagggaaaggctgggggaagatgggaggaggcctggccacacgcatctgtactgttggctcctttccccaaggacccgcagaggtggcccagggtgctgggcgcttcaccctccctcattggtcaggttctcttcgtcctcccgcgccgcgtgtctggggctgctgtggtgcgggggcagaaaaggaggggcctgccagcctggttctccagcctttgtgggcttcgattggtcctgcctggcagagtgctctttgctcagaggagtcaccagcagttgctgggagcggtaggattatggtccctacctggggttcagaacaagaactttgctgtgaactcccctggttgaagcagagggccaggaagcagagggacctgaattccccaccaggcggtccctacagagtcatggaccttcctttctccccgcttcctcctgccctgttgtctctgctgagcaaggcacggggcgggggggcttccgctgggtggacttgagttggcctagatttgaatctgctcttactgccgtggactctggcatgagactctaagcctcagtctctccacctctgagttgggaatgataacagaattacttgatgttggtcatgttggctgttggtgatgggcttgttaaatctggtcgttggggctgctcaatatttgcattttcagaacagcatgcagcgagtaactagcgctccaggacaggacttcggaatgtttccatttgttccttctgatcgtgtccttttcaaatctgatctgtagtttgtttcttgcctgatatcctacctgctaagttttacatgcctttatgtgcgtttctttttggacacattttatcacccatgcagaaagaagctgctccagtcttccagccgtggttaggaagtgcctgccattcagaagtcagttgtagttttccacatggtcggctgaataggaatgaggcacttccctgtccctaaagagctcacagtgtggaggagagatggtatacttctgctttaggctttgagactctttgtaaatacaactttgattaaatttgttcatggtggcttattatttccaaggcaaaaacagtcatttcaaaagactagactagcctctttaaagtgatttagagtttatagttgtgttcaaatgcgttctaattacaccctccaaacaacaagcctctgttttcagatggagaaaacaaaggattcagattgaaggactgctcagacaccctccgaagaggtggccctgcctgcgctcctcctggctgcagagtaccccaccagcgcgtgagcctgtttccctatcccctggttttgagtttctggcctgatcgttgcatgcttggcttcactgctactttgtgaaactctttgctgagattttaacctgggctctactttcagggcacgatgggattgagacacatcttgggggatgggtaggcaggtgagcaggtctgaggaggaggctgggtctgccttgacctgtcctctcccatctctacatacttaccagtaatcagtgcttgatgctgaaggtcatactgagatggaggctatgggcaagagtttgaatctgtgtggtcttctgtgggtgctcactgacctgctgtatgtggatttccatgcaccagacacatgctcttagaatgtgcctggcagcttgagcaggattgagggatctagagctttcttctggctgcttcccccacaatcaaggagatttagcaagcaggtgcagggccaagttcagggatgtgggccacaggcaggccctttaaatccagtcatccattttgattcttctctccttgtggtatctgtcacttgtcaaaaaagacttcatcttctggggctgtcattctaagcgtcattttgccatactgttaaaattttctgagtgtttgcttgatttgtgtttattgaaactaaattcattaggatgatgtgaaaatagcactctgctgtttaccaaatcggattcttgttgttgatatttcagtacatcatctgttctcacttgaatgtcgtggaatttgttggtaaagtgctgtgcagatgaaaacccatattttagtggagttttttttattcaaataagtttataagtattatatacccaaggtgcttgatttgccatttgatgcagtctgtacggatgtgcgaatactggtgcttggcttgggctttgagagtttgggggtgtgctgggagacagctgcagggattaggactctaccaggtgctgagtcagaggctggttggaaatcctcctcctccaactccgcccctcgccagctgtttgactgctgccaagtcccccaactgtgggaaccccaggccttcatctgtgaaatggccattcctgtgtttctgacaaggctgttggaagacttcattgaagacactgtattggtttttcagcactttaacatctctggactcaagttgtgtcataaaattgatcacaagccatagtttaattgacggcatttttttttttctcccttagtggtttataaaatgatgctggtctaaggtttgatgatgtcttagacttgaagaacatgaacctgtttttgcaaaagttttagagtttggcattttccaacaaaaaggcagttgctggacttttgaattggtcaacgaaattccacttgttaccagaagatttactagttgcatttctagagttgttggcctctcttttctgatttgattcagtggtcagatcatccagggttcttgtgttcagagacccagagtgctataatgcttccgaaataagcctgacctaagactgagacagaaggtgagtatggcagagaccaccagctgtccaccaaagggccctgcttcccttccaccacctcaagtatctgtcggaggctccatgatagttcccacatggaatgtgggtggcaatgtgtgtcgcttcccggcagcactaattaagaaacaagtgtgccttgctcagtttttctcctgttgactgtcagctggatgtggaaaatccagcagagaatgcctaggtgctaggggaggattctgagtgcctgaatcactctgtggagcagagttgcccattaggaacatgagcctgatgttcttgtgatttagaaatcaaattctaatgtgttgagctgatacacaattttaggcttgtttgttaaagcagacaatgtgaacgtaagtagtacagtgagttgggtagttccaacccgccgctgccccctccctgtcctacacttgcttgggttagatagaaagcagcgccgtctcccattcaccagcctaaatgaacctcatggcttcacttcactcattcttgctcatttattcactgagtcctgtagattctgcccctcccttctgcccttgtttgggggcctcacacctacccaaatggcatccacctaaacactttgggttcggctaggtgcccttaaagcctgattttcaaacgttggagaagtttagaagcaagtcgggctgtaaaattgcagcaatgacctggcatggtgtggcagccatgaagacgctcctgatcttctgcttctgggaatgtgagtgactggtggccccagctgctacgttctgaatcccgcagtggaaatccagcatggcgttcccagacagcctgcactctgcgggctgctcccagccggggacagcaggtgaagactcctcctccccagcctcctgccttccctgccatctcatctgcatctgctgtcagacttgcgtctccctctgcctccccgcctgtctgcctccccaagaagtctcttccagagctgatcgtgtcttggcttcggtttttggaagagccgagccaacacacatcgtatttgagatacagtgggtcggaggcgatacccagggattttctccagcttggacagcgagccctttgccctctctgggtggcagggtgcctccctctaaaatgagggggcgatgcttggcagtttctagaacctgttcagatcaaggcaacctgggagttagagttccgctagtcttgtctggcagtacagtcggtctctaaatatgcttttattgtaccttccccaccatctgggtgaagcatcagtaatgaaaatggagtggaggctgcattgaccttttccagtgtccacgcactatattttaactgggaagttgcatgtattttctatacttaatactttaaaagcttcttgggcctcttgagaggcttgtaagtgcagcccacgtgtgacttgagctgggaacgcaacttcagattgagaagtcccacttttataggacacagcatttaacagcagctgcgtccaagtcgtgtggcatttggcagcgtgtttccaagtggacctgtggtaatcactttgctcttggggaaccgtggccaagggctgccctgcctccaaagaggctcagcaagggaaggctagaagtcctgtgggctggccaggcatggtggctcacacctgtaatccctgcatttttgggtggcagaggtgcgtggatcacctgaggtcaggagttcgagaccagcctgaccaatatgatgaaaccccatctgtactaaaaatacaaaaattagctgggcatggtggtgtgcgtctgtaatcccacctacttgggagactgaggcaggagaatcacttgaacctgggaggcagaggttgcagtgagccgagatcatgctattacactccagcctgggcaacaagagtgaaactctgtctcaaaagaagaaaaaaaaaaaaaaagagagaaatcctgtgggctatacctgggggttctttgccctgcttccaagccctgtacagccagcatgttgcacatgtcattgtcctggggttttcttcccagagggcccttttcggtgcagggtcctctgtttcatcagcctgcgttagcacaaacaaccctgaccgtgtcctggacctccttgagctcacgggcagaggttgctgctctgtcgtgtgctgtttgcagacttggacttggagtagttattctccctgtgcctccagggccttggtcctcacaggtgtttctgtgctcctccttccagagacaggcctcctgtgaatcgctctgaataaaatgttcccagctgaggttttggagtctcctttggaaggttgtcttggtattgttttcagtctcttgttaggaaaaccggacaggtgggtctgatcatctacaatgaatgtgcacaccacccccgggttcggcaggacacactgtgcccccagccctggtcatcttctgtttgaccacatttcttggctgaatttcagatcttcacctggagcacgggtctcatgacctaaggtcaacctgtttgtggttctttctgttttttctttgaggtaaaacttagaggaagtgttgggagggaagtggggattggtggggaaggggcatgaggtcaaatgaaatgcatgaccttaagtgtgccatttggttagttctaacacacgcacatacctgcgtaccccccaaagccctaccaagagctacagtcactccggaaagtccccttggggccctgccaggctgtccccaccctcacctccctgatcatctcaggccaccactgttttggtttcttttccttcaacagaggtagttttgcctgttctagaatttcatgtaatactacataatacatgtatgtacattatacacagcatatacatgtatacatacaatttaatatgtatgtatattatgacacatgtacctttttgcatgaagcttttttcatgccacacacatgatgtatttgagatttttaagacattttgggccagattattctcttgttcctttttacttctgagtagtattccactgaatgactcgaccgcagtttctttacccgctcacccattaatggacacttgggctgtttccagcttttcgctattctgagcaagtagctatgaaccattctcatgcatgtctttttgtggacatatgatttcatttctcttgggtaagttcctagaaatggaattgctgggtcatggagtaggtgtatgtttagtcttacaaagtggttataacattttatgcttccactgatcatgtatggaagtcagctattttttaaaccaccctacagaacgttggctttctgcttgggtggtggagtgggatgggagggtgagtgggtagggccccctcctctcccttgacccccacctccctactagcaggatgggggcaggggtctgcaccgttggctctgctgggcgtgggctgtggagttcacatgctctggaagatgtagctgtgtcctctatattagggtggggcctgtttctcttgcttttcctggctattctgaacaattcttgttccttcattccttccccccgcctcccaatgtctctcccttcccctgcttcctcttgtccccaaaataccatgctctctgatgaagctccaggctagtaagtcaagaatgaaggtcgtggcctttggtacctggtgtgttcctggttctttctgacatctgtgcccactgttttgcattcatgactgacagaagtggacttttggagcctactgatggtcacatggtagcacatgctgtcctagtttgcttccgtgtgaggatggacacttggctaagtaggtattctagacagctgctcccagagcagcctcaccatgagctgggccaccccagaacccggcatctgggtgtgctagcctcatgggcctcaggaagctgcagccagctcttccaagtctctggggtcattacttttagaagcatgttttatagggttactagaatgttctcttaagtggattccattttatgtatttatatcctacctctttcaggaaagttctttgaggactcaaaaaataggatgccgtaataggggttgagattgggggagggccaaaattgattttaaaatgcaaatacagcaaccaaaaatttcacgacagttgctgtaacagataacttaagttgggcagctctctctgagtttagggagggatgacgtgtgtccttcagggaaacagcttgccacagggaggtgcgtatagggcatagtgatggctgtaaagtgctctaccaccaaccatgggctgccaacagatgccaggcctgggttcccacaactgcttcttgtgcttgagattgctggaaagagtcagaagtacaacatggagggatgtttagaggaggccattccatgtgggtccttctagggataccctttgatttaggatcaaatttacaatacctcaccaaacaccgagccaattggtacaggtctgttctcccaaaaaattattgatctcagctgggcttttgataggcgtttgagagaagatgattcacattctactttcttcccaggaactgacgtgcacggctagccccggtgacctgccagcctctcagatgtgcaggtggacagtggttgaggcaggcctgttggttccagtgacacagacatgagatcagggcaggattgggcttgtttgggttgttgatgagcactgcaaggggtgaggcagtgatgtcagtggttgcgggtgagcagagttggaggggttgatggaacatgcagttggacagaagtatctagaaggcaggtggtaaggagcctctggagtgcctttgatttgagagcatgtgcatggggctgaggcagagttgccatccctccttcgtccgtgcctacttcgtgtaacactcggctgtttcttgtttgaactccttgaggacaaagttatgtctcatttaatttccagccttccttacttaatagtacctggcttgttcacagttgatgcagtattgggatggacagagtagagtagagagagagagagagagagagagaatgtgtgtgtgtatgcacgtgtgtggtgcagcaggcaagacagatggcagctgagaatgggctataggctttgaccatcagaagtgcacgcagctcttttggatgtgtgtgtatgtggaagatgtgaatgtggtgtggaaatgtggaaatagctatagatgtgtatatgtgtgtctgtatagcggggggtggtgatcagaataaaagcttgatggcaaggatcaaataaggaatgttggcgcctaggggagcagatagtagcttctctggggccgaggccgggaggtgcgagcacatctgccctaacagggaaggaacaagtacgtggcttgtcctgattgacgggcctggccctgccatgtatttcggttcatctgtggctttctgcctttgccatccccatcctcagctgtaccacacgtcagtttgtggggcctggccttgcggatggcattttctggtgcttcctatccatacgctaggaacggagttcagcacccaaggaagagaattctagcctgaacccaaagagagaagccccttaactcttgatgtcttttaagtcccagtgacttttgagtttggctttggtcgttaagtttcatgactgcctatttttaagtggaattagaacttaagttaccgagaatcacagcgtcttgctaggtagcattcctctcgaccctgccaggtgagcttctgagaggctaagtgacttgcctgaggtcacatagttggacaaggcaggaaagcaccagcagctgaactggcccattgcgaagtgtgtccagcgggcctctcccaggccaccgctgcactgcggtctagtggtacaggccagagccctgggctcctccttgccttcccgcaacctcagtccactcctgcttcttaggtggacggcactggctttggcttgagactgggttaggcatgtcatctatttggtttctcgaatgctcagccctgacacttcttccgatgttcttagcatcacccttgaacaaacgttggttggggatccggggaccgacttgtttacacttcttctgatttgagtgaaataccaagaggctggcagagggacagcccctgagctatggctccctttcttagcccagatctcaagagctttctgctgtttttgctgtcatctctgctggatgtcgtctctgctaccgaggtacagcagttaggaaacattcgcgtccccatcactctggtcactctgctgactggtttttggacactgagtgtcccattcactctatcactgttgactggttttgggacagtgagtatgtgacatgcatatgacccatgcttaactcactcggagccattatctgagcactatttgtcaggtgctaagaaggcaagcttcaattgacttaagttccagcggggatgtttgctttttatgaaaatgatgcttagtacctccttactaagacaatggcagaatagaccagactgttgtcttcagagattcccaaacaccggatattgacaaggtttgctttcctaaagttgagaagagggctgaaatataaggcttatatctgtctctctgagcattttagaagaaagatatatctaagctctgtgtttaaatatagcatggtgtttgctactcggatggcaaataagcaattgaatatgtaggtcattgacttatgagaatgagtttggaggtttttttgcatgtgattaacgctgtcttacgattgggctgttgatgctccgccaacattgggttacacagagttcagcaagccatctgggaagaaaactggaagaatcatgagaggatacctctgtccccttaaggtgttaggagtgtgacttggtgttgagccctgtggctacagccagtggcagtggcaccaaccgctcccaagttacactggggagaaacacatctgagtgccgtgcgtctgtacatatctatcaggagggagggggcagagggcgatacttcatcgagataaatgccagcggtgtattttaatacattcttgattcagaaggcactgtttggaattgcatatttaaaaggaaactgccatccccttttgaaggtatgtgacatttaaaagatctgtagcagaagattggtttgacagctttgaattataattgaaagagtttttgttttaaaaaagaaaatgattacttctattttaaatgtcatcacaaagacataaatatgtttaatcaaattatatatttaatgtatgtagaatataatttttgtttgtgtggaagagtcactggtttgtgtgtgttttaagcagctttaaagctaagcaatgttgatgatttgaaagtgattcagcttttttggtaaatgactgtttaagggtttatagaatttcaaaaaatagtattattaaaatctgcttattttttatctatacacgtgtacctagtggcacattttgggagatggaggtacttttattgttgctgacagatagtaaattgtcgaatgaactgaaaaaacgtggaaccttgaagataataaaggcggaaacagcaaagacgctcctgcagttttcttttggattctttgaaccagcggggagttaccgggagtgctagcgtcgagtatgccagcccttcctaaaagggaggcagcaggggaggcccaggaaaagacacagagtgccacaaagacctttcgggtgatacaaaaggctggtgtggcatttgagggcaccagcaaggtccccaggctcgagaagcaggggcgtagctctgggtctcccctgaccctggctatctgctagcacactccagctctagaactttctttgagcaagctgggtgttggaagccggccagcccagcgtacaactgtgtatgtcagctggggacagtcttggcctgttccagcctgctctgtagtttcgatttagccagactgggtcagggagtcctgaagttgttacccaccagagaggcacttgcccagcacagagctgccccgggggctggttttctctgctggtctgtcctccagggctgctctgtcagggaacgtgccctctgttgggtgtggccctgggaggcctgggcagctggcagcacctgggagagaacaatgagtcagtcatgcccgctcccaggaaagaattgacgtagcacgagcatctctgccagctccagtgagagaaggtcagggttcaggaattgtgagctctggcttctcgagagacaggatgcaccccggggcccctggggagccggaggacacagatcccagttgagtgcgtaagcagtgtcaacagggccagctcctcatggcccctccttgtaagcgctgatcccctaaagaaaggaattgccctacttagtgcccagcatgagctaaaccacataaaccaaaaaatgacaaatctgttattttaaaaattaaacttattttgaagtaattgcagattcacatacagaatgaattcacagggtaggagaaggtaatacaggaggtcccttaaaccctttccctggtgccctccagttgtaacattgtgcagagttctggtaacagcaacacagcggagaaattgacgtggatagaatccatggatactattcagaaatccctagtgtaacatgcactcatttggctgtgtatttagtctgtgcaattttagcacgggtaggtctctatttgtaccagcccaagaatccccccgttgcccttttatagtcatatccacttgaggtggccaggacggtccccagctgaagcacatggtcgacacacatgggtagacacagctgaccagcttctaagacccagtttgctcaaagaaagttctggagttggcgtgtcctacctacttcctggtctctaagcctggcaaccactaatccgttcaccatctctccagtgtcatttaagaatgttatataaatggaaccttacagcattgccgcctttgaggattgggatttttcacttggcttaattccctttgagattcattcaagttgttgtatgtatggctggttggtttctgtgtattgactggaagatttttgacccagccttagaccagaacactgcggaagaggaaatccatcatggaaacccgagagtgacaggacccttgcttggtgacaagtagagctggtcatgtcgacagccccctcttacctcgtcgcgtctcagcagatgtccatggggtcgtattgggagtgacttttgtaccagttggcttggctgattttggaaagagtggaagaacccccttcaccttgtgagttttgttcatctgtgttgcatgtgtttgcacagtgtacattgactgaaacatgaagaaacagcccttgggcttttgagtctcggttttctttcttggcgctcatgctctcagaataataatacgtgtggtgcaggcccggtgcaccaggcaagtgagggctgtgctggcatggtttctttaggaggaaggcctgttgcacctatgtggctttggcatgcttcagtgaaaactgtaaaattacaagtcccaagaatctaatctcacagtgaaaatgttgagttgttcattcagaaagcacgcttgccctgcattttgaacatacatacttgtgtgtatttatatgttcatcatgtgagaacagcatttgtgaattgctaccctcatgaacatccatgctgaaaggttgtccattctttccaaactgcagaaatgcggctgagcagttacatacgtgtgtaagttagttcaggattcccagtgttagtgacttgatgcgcatgaatcaatagataatatttctatgtcctttaggggctctgcagttattttttttcctgaatcaagactaaagccagccctgctgctgattgtaggcaagtgccctttgctttttggggagccaggactggaaggtctcttggttcacaggcctgggttagggtgggccgcaggttggtctggagtttggcttttctctcccatcccagattcccctggtaagaggctgcgtcacctgcatcgaggaccatcagagttgggtggtcggaactcactttggctgaatgtgaaggggctgctgtttgggaggtttcacctccgtgatgtgtttcttgagcctgggtgacagcgtggtgtggcgcaaggtggaaaggagtttgttgctgatggtctgggggacgcaggcctttttccccatttctagatgttgttgtattcgtttggcactgtgattaattcttaaaaatagaatgagttgcttctagagggaatatattttggacccgggaattcagttctgtctttgggtgcttccttcatggctgtgtttgcagagtttcttcatatgctattttctgtgatatacatagccttgaaatggattttttaaagtacagagtctgaaaagtgagtagtttgtacatggtgggtttagctgctgctccattccacagcaaggatactcttcattttcaattgaaatctcccccaaccttgaggtttgggttcataattcagtttaaaattaaatagaacccggtttccttcaggcctcttttctttccaggactgtggattctcgaattcaccaagccgtgtgagtaaagcatttggtatatgatacagctaacacttgggtgcctctggcgtgccaggcgccacgctgagcgctgtgcattggtattgcctgtgcttcccgctgtggccccatgagggaggtacaggtgaccacacctgggctcctgggggaagaagagaaagcagagggagagaacactctcctggggtgactcacagcctcacccaagggctccttaccatttggttggtctctgagctttgcaggataaaacttggattctgtctctgctctcatggatctgcccatctaaaccagttacagaacaggcagcccatttatgtaatgccttttgcaatagataaagggttgagggtgaggtcattgtcaggggaaggcaatgtgagagagtcagggtcaaggaaccgatatctggccaccttaattttactaacttcactttcccagtcagtattgcacatgtagtccattgatcaatagtgttgacatgggcagggcaattagctgggcttgggggcccgtgcctgtacaggaggctgagcccagaagaatacttgagcccgagaggtagaggctgtagtgaactatgatcatgccactgcactccagcctgagagacagagtgagaccctttctctaaagaaatgttgttggctggtggctcacaactgtaatcccagaacattgggaggccaaggcgggcagatcacctgagttcaggagtttgagagcagcctggccaacgtggcgaaaccctgtctctgcagaaaatagaaaaattagctgggcgtggtggtgcatgcctataatcccagctactcaggaggctgaggcaagagaatcacttgaacctgggaggtgcaagttgcagtaagccgagattgcaccactgcactccaacctgggcaacagggtgagactccgtctcaaaaaagaaaaaaagaaatggtgttgatatgtaaagctggtcacgcttgtaagtaatttttcagggactgtggactttgagccatttggttctcacttcatttgtttttaaatgccacttcctgctcatcttcctgctcatcctgctggagtctaatctgtggtcaaggacttggctggagcccactgggaagtctcctttggctgagccctgacaaggctttggctgtgcctctttcccggcatcagtcggggtcctagatcctcgctggggcaagggattctcgctgtgtctctccagcccaccaattctctcccaggttgattggctattggaattgagacatctgcattgaaatccccaagagaacatccttttctgtatcgaacttgcatgagggtggagggacacttggcttttttcaaaacccacctttgtagtacagcagccacgcagggacttacatcctaaatggggccactttacaatgttggtgtggcccgaaaacctgcaaggcaaagcagcccaggcagcagctcactttctgcaccccagcttcagagccctcctgacaggagctcacagctcacatttttccatattataggaaatcatgctctttgcagaaaatagaaaaatacaggaaagtataagaaataagtaaatgatagttatgttacacattgtaaaaatcctttttaatcttagcatggagaataacactttggatctattctgtctcttatgcatatacgtatatactaaaaatgagattcactgaagaatgttttaaaatatgtgagatttgaatacatgtttcatagtttattttccatttgacctataagtatttttcctatgtctttgaagtattttgaaatacttttagtaaatacataattgttgagatggatagtgtctgacatatccctgtacagctctatcaggagaaaatttatcctactctggtttccagcatggtctggtacatcttgaccacttttctaaggattccctagggggagagtggagtggggcatggaatctcaagtttacagaaaagatgcccactccttccaccgcagtgggagtgggggtcacaccctcgctgactcctcagagcagccagcatcctgcttttggtcaggggatcttgcattaaaacctgccagctttagaggttccatctctcgctgtggtatgggtgtgtgctctgaatgtctgaagacccctctgctcaccttctggccctgtgtagggcctatagtaaatatatagtctggcccttgttagatcaggtgtccttgggataccctgtggaaaggagctcagaaaacccctcttggtcaccctatcagggagaaagcaagaccggagcctgacaccaggatgccccagctggttagtagtggccaccagttggagtgagccatctcctatgtccgctccttctggcaggttcctgaccatctcacaggggtgtgtgcacctccaccagcagccgccttgtccacttacagtgtggaaccatggaagactagagacggataccttcaagtgcttctgagttgggatgtgttttctacttgtctttcggagctgcgcgcctttgcggggacctcagggccaggcttccctctgagccaggctgattttaagcgttccccatccccccctcccaccccccagcgcctccactgcactggtctctttcaagttcaggtgatttcctggcttgtctgtaagtaggactgtcgtgccccactcaggtacaggtgtgtgggggtgcagccaggccccatgagcctcaggtccagttgctcacaccggctgcctctgcttccatggcccacgggcagctttgggtgtgggaatgcagcttgaattcacaaaatgacgtcgttgtgtgggctgcttgctcgtggatccacttttcttcccccctttcaaaacttggcccatggcagccccgatcagcagcacccgtttatcaatttgttccttgttcctttctccagttgttgccaggactcccatctggcattctcccatctcacgcccttgtttatttctccgtcctggagccacttcggatggggcacttctagaagcctagctaatgccgcaagggcttcaagttcctccttgtcacccagctcgtctcaagtccgttggccctgtcatctagaaaagctgaaagctgaaagagcaggggaatggtcacattaattgactacatctgagacaacactggaaacatatcctattttatttttctttaaaaagtggcaggattccaagacttcccttccagttttccactggttggccttctattggaagacgagttctaaaatcttggctgttgggcctttttacattcttaaaaccagctgaatatatttaatattgtaaaatttccataaacactctctgacaaagactgtgtatgtaaagtttctgcctagagggcatttttcttctcagagttgagactcttgggcatcagggggtcataatgaagtgttgatttcacctgaagtgcctctgtgccaacgtggctgtatagggacatggaaagaattagctttcggggttgttgttttttccttccctgaataaaggataattgtttccaagctaattaatatggtttatttattactaggcaatagttggtggaattgaatctcgggaaggaataatccagcaatgctaaagtgacaacctctcgggtacaccctgttcattcctgtccagtgtgtatctgacactcagccctttggtagacgttgtcattttattgtatttcttttccccatgtgccaaccaaacttggactccacactgcttcatgcccagtgagcttggcctttctcagggtgggtttgtccttaaaggctggccaggcgcgtaattaatatggtgggcttggggggtgccgtcccaggcaacgttgagctgtgctgtcatggtagcagcctgaagtccttgttagagggcatgggtcacacgtgtaccccactgtgtggtgctcggtggcagagttgagaagtgaggagaggtggcatctcccactgccgtttgctcagggatgcctgtctttacccccagcagcccccaggactgcacatgacctcttcctgcagagccagctggcggccatcccagtgccaccccccactgcccccgttacaatgcgttgtactgcgcgtcctcactgcaactgaagagagtcggggcagaggagggttgggaaggccagggagcgggatgtcgccttgtgggagagcacaggtgtggcccgtgttcacacacaggtggccagagactgcactgagggtggctgggggtgtgtgaaccaggagccactgtggtacgcaggaaaggaggcgggcagctgagtgcctgtccctggtccttcagggaacccatgggtcctctgggctgcttctcatggcctcgagtcaagggccaccatcctgcctcatgctgctgtaggcaggtcagttttggggcagagcatttggcttcttgacaagattttgcccgaggcttttccttgaccgctgcccttgaacttgaaatcgttgggaggatctgctatgggatgtgtggggaaagcccctggcaccactttccatgccatccgctcagggactgggaaacagctacatgtcttccttgtggtcctaccattgagagtcctccccttcccacatactgactgataccccgaggcagtgccgtggtgctctagggagtgtcaggctaggagagggggcttgccctggggtatctgagctgtgtctggatgcctccgaggggtgggcgtgatccccagggctgtggctttagctcggcttctgatacagctcggcttctgtgggtcccacttttagcacccccatggtaagtcaccccttctgaagggggccagagtgttgggaggaggggcagagtgtggggagaagggtgggacatttcctgggtacccatgtgacgggcccattttgagaaggccgtcagcatgggtgccgagggagtgtctgtgaggcagagggcgttcactcgtcctaacagacaccatgcttccagaaacctcaggccagctgtggggcactgtgacctgcacactacccgtctctacgtgaggcgtgggtacaggccttggccccagagtttgcttgggaccttgtggcacagtcattcggtggtttgggcaacagtggggcgggggctgagtgctgggttcgggcctggagtcggtggcccctcctgagtccctggggcagggaccaggtttctgttttgctcctgtgcctctggggcttggcacagtcctggcactgagtaggtgctcaggaaatccctgttgaaaggatccaggagtttgaggtcatagttgatgttgcatctagtccagagaggtctctgaggaagcctggatgtttgtggtgggcaggggtgtggagtatagggggcgaagactgtagactactctgacctgctaccatgccctgtgcttggggcagaagtgcagaattctggatggttctttacgcaatccctcttttctgagcacagccataccacaggatggcagtgaggccacctttcaagggaggggaacgcttgggatgcctaaccattaaccatcaatgacctgattaggactattggattcttgtgctgaatgtcaactgtttatctcatgagttaggcagagatgagtttcttagaagaggtggataacggcctcagcctggagacatgtctggagtctgatgatgacacacagttattgagtgcttgctgtatgcaggccttgggacgaaccttccatgggttctctctttcaaagggcctgaccacctgtgaaggtagatgctgttacctccaaatcacaggcaggatactacttctcagccaccgatgctggcctgcggaacttgggattaattcttgctaactccttgttctttcccttgtcccttcccagagtccattacctgtgggaaacttttgatcgcctaagggatggttttgtggacacattccagttttctctttttagcagtaaacgtgaacggtgcttcctggagtgtgaggaacacagcgcacagtggtgctccgttcagccagacccgtggaaaccatgagtcagtttcagataaggctttccagggtgcaagggcccctttaggatcagtctttcttctcccctaatatatgcccacgctgagctgaagttctgctctctggctggtgtgacccagccgcagggccagcctcaagaggaggcagcaggaggtgccccaccttgaagcaggggtgatgaatccttcgccatccacggcgggacagtagtaggaggaggagcctagacagccaaaatgtgagttcaagcagaaagcctcaagtcctaacgagagctggcacatgtgagcttcagatggcagaaatatcactagaaatccctcctgcagagaaagcgtaggtaagcgggcacttggttagatgaatgctgctcacagcaggcggcatgggggggccaggccaggttgagctgctcgcctggcctctgttatctctgcatttgggtgggtgggtgggcaccccttccatgccatgcagagtacagaagctgttctgaaagaacgctatgagttcaagtgaaggcaggcccagtcctcctggaaggagccacaccagagtttctcagacgcccccatcaagacctttttagggctcattgaaggcttctaaaggttctagtctcatttagtttctaagaaaaggatttattcactacagacctaaaacgtaatttttgtatgcctgacttagtataagaacaaaacacccaagcagtggcggtggggtagggggtcctgtctaggtactgcagcctcagttgtgagtttcctatatgtggaaggtgcaggaactagctgaccacagtctggttgggactcccacccccaaatccatctctgggtgctgcggttctcttctgggatgtgtgagagtacacacccccctgtcatcagctgtaggcagatcacatttgccgcgggatgtttaataagttcacgcaggttgatggtacaggccagaaataggacccctgtctggcccgaagcagccacgtgaacttggagggggtgggcatgctgaccggcagttacacgctgaggccacttcagctcctgcggttgctggttcagaagtagtggtgattttaatcagctaagtcatttctgcgtctcgttgtatactcctggaagttcttagagaaatcctgccaagaaaatatcccctggtgaatcctcggggcactagtccacgccgcactgtcagcaagtatctgctgaaacaagtatttttgaatctttagcttttctgtagctccagtctttttaaagtacttcttttgaccttcaagtaacaacgagcacttgctttaaaattctgacagtcttccaagccttttaacattcttattccactaaataagctgtcgccgttcactgggacaggcagcacagttgcttgaacgcccggcttgaaattccacgaaatgtcacctcctctgtgaagccttctacaaggcagacttgtctatttcctacttaattttactatgaaatatctcaaattagaacctgtacccaccatcaagattaggtagatgttaacatgttgctacgtttgtcttcagacattgttcaaaaacaagtaatgttatagtcattgctaaggtgcacctccccagttccttttccatccctccttcctttccaaaagggactacttcctgaaaatagatacaatccctttatatttttggaaattctgtgtaaaccattggaaatggaaggagaaagcctgtgacatacgaagacaagcaacactaatcaggagtataaattctgttttgcagttaattaaatatttgattccctactatgtttcaaagataaataaaatgtgattaagtaaaaggcatttaacctttagagacttggagatgggcagggtatatagtagcctgccagctagagtagggaagatgttaaagaagataacctgtgagatgggttttgaagggtggataggagtttgccaggcaagctctgccacctcaaaaaaatagttccttggctgttagatgcttgtgtcactataggcttgggattactgaaaagctatgcttgtccctcccttcctaacacttctgaggctggaatgtctgtctcccatctacttccttaagaggtgtgggttacagtgtggtgtacagttgggagtgaattactacttgaccttgggtacatgataaccttgactgtagagtccatgcttttcctgagtagttcttcagagtccttcctgccagtgacttggttctaggtgtggagcaggagctggctgtcggaggactcattgaattcagtggaaacagcagggagcatggttttcttttgaatggaaaccatgagtgtagcagttcttctttatgacttgctacataatcatgcaggaaaatgcctgtcacgggattggatcctaggagattagccccattgctaattaaaagccccattaaaagaggggaagttcttttaggtatctacagcttcctaagatttgaatggtttacaaagcagaatgttggctgggcatggtggctcatgcctgtatcccagcactttgggaggccaaggcagacagatcagaaggtcaggagtttgataccagcctgaccaacatggtgaaacctcgtctatactaaaaatacaaaaattatccgggcatggtggcatgcgcctgtaatcccagctactagggaggctggggcaggagaatcccttggacctgggaggcggaggttgcagtgagccgagacggcgccattgcactccagcctgggtgacagagtgagactacgtctcaaaaaaaaaaaaaaaacgaaaaaggtagaatgatggctgggcgcggtggctcacgcctgtaatcccagcactttgggaggcccaggccagtggatcacttgaggtcagaagttcaagaccagcctgaccaacgtggtgaaaccccatctctactaaaaatacaaaaattagccaggtgtggtggcaggcgcctgtagtcccagctattcaggaggccgaggcaggagaattgcctgaactcaggaggcggagcttgcagtgagccgagatcgcgccattgcactccagcctgggtgacagagtgagactctttctcccaaaaaaaaaaaaaaaaaaaaagtcaaatgcagctgggaatgtggttcgtgcctttttgtatattaaccatttgaaacttggttgtaaggtggggttggcaatgtcaggcctggctgcagcagctcatgtctttagagtgtgcctcttccctctctcgtggggctcgagcaagactaccttcatacatgggctctccagttacatagcaactccagtgttaaattccatcttttcttcctggaaaagccgtagaaaggacacctggacatgcctgctgcacaggttgtctgccttccccatcagccgcagaaggaggaactttgctctcttctctcacagctgtgtgtgcataggaagtagttcggatgatgtgggtcccaccatgtattccttctctgttccatgtagagtaaaataaatgggagttctgtttaatgcatcacctcggttcatattgcatttgccaagaaagtgcaattttattgaacattaggattgaattcttaactgagtaatcaatttcagtagtaagttaaaatgccttctattaatggacaactgcaaccgttaatcagagttacagtagattaacagttgtcagcatttatgctaatagcacttataaaccgtgggctcatgatttgcactttataattccatatttctcaaaacagttggtaatactttttgcttgaaggtattgattcttttgtccctttgcttgctacttggagatgtagagaaagctaaatgacattttcacggtgatgacacaatatcaccttctgcttttgcacacttggctttgtgtcaaaatagatggaaagggttcatttgttctggtgctctactgtttaatttgatctggtgtgtgactaaagcaagacaaatagtatttttaatgaaaccatttaataacctctggtagcttagagtcgaaggcattggaaaaatgcaattaaaggatgcctagatgtaaacaaaaaaaaaaaatctctacttcatcttcactgactccattcattttgctttcagggtttcatcaccttaaatggttttgaaccaatgaaggtgtattcccttaaaaagacggacagcccatcgtgtgaactatagagtttgtggacagatttatattggtgagttattgtgaaatatctccaggtaaaagttcagttttctagaatcccctttgcaatgtgtgttcaattagttgatgagtatggattgcctgcagcctctggctgtttcattgggatgtctaatcgtgggatcatattgattgtctttcaattaattgcatctagtattttcatttatcaaaagcaaaatacatgtaattaactctgaagcaatatagttcagtgtaaagtgatttttgctgctgctgctgctatagagataagtcaacggaaattatgctacaaggaaactcaagtcagaatggaaatagtgttaggatttctcgatgtattaattaaaaagaataaaaatgaattagagaaaccatctcatgacaccccgagtcagtcataagtgatagatggatgtctttaggaagaaggcggcttgtggatactggcacctcttcagtcagcttaggcttttagtgttaccagcctctaggatgtcttgaacataccatgatttttctggcggagtagattgggaatgtgggtgcaggctgagatgagcattcaatccctaccacactcattgatggatggagttcaatcctgtgcccgtagcagggttttgggattctaagtttcatttcggcatgtctttagccatttttcacaaaacctggatctttcttaaagtctcaaagtggcaacttctctgatggaattgattttaatcttgctttttaaaaaaaaatgttttccccgtgaggtaacaacatcattcaaaagcaagggaaaccgctagccaattgtgtcctgtctctctcacctgtcacactcctagcagagccttgaggggactagctttggttcccagagaggtttaagtttgtgaccaggccctcaggcctggcttcctgagttgctggaggcagttagagacttggagcccaggggcacacatgggtgaccacctgagggggccaagctgaatctctgcctgaacctaagcagcacagtgggttgtaggatcaggaaaggatctctgtgtgtcccttccttttctccataaagtagatctagctggggaaactgaggtagctgacccagacctagacctccaaatattgcttaccagcttggtgactgagcaagtggtctctgctggcactcggaagccttatctgtgaatcgaacaggtggattgggctggtacccaggaccctccccaccctttaagcttgaatttgatgtagaaattcagaaccctttcctgggagtgctctgacagggctttgctgggccaaaggccatagcagagcgtgaagctcgagttgagttgtgtatgagaggggcccctcagtcatctttgaacacttaaggctcttagcattgaggaggatgaggaactggaagtctgatggaatgttctttggtggaaacctgagggaggtcaggaccgccactcgcaaccttattcagttcagcctttcaggacaaacgttgcttacttttctggctctcactctcagacctgtgtgctagaatctgcccgggtttctcaggcagagacaaagtcaccttgggcctggggttggcaaagatagttccagtgttgggtgctgggtccaaagatgttttcagtgggttgggtcatggtgatgtttccagttggacaccatggaactggccatgttggacatccacgctctttcacccagacaagtaccaggccctgcctgcctgggagcatctccgctggatggaccatcattacgtttcatagatgctcatttcagtgttggaaatcattttctctaaacagaaggatgtgggaacttggtgtataaggatgaaatggactttttaaatatcaaaaatggttgaatgaggacactttcatttgactcagtctaataaccagagccactctgggatcctgtttagcagtgatctccctctcagacagatgagttaacattctccaaatgcatccagaaccagaatgaaattgtgacacgcttcctgttaacaaatgtttcctgagtgctaagcagactcaagacacttacccttatgtggggttcccaccattcctgtatttttggcatccttttgggtaagagttttttatagcactttggaagagcttaagagacttggtgtggtactggagctggccatcactggagcatggtcactgtgctgtgacaacagctcatggtgtccacggcccacgcacacactgagtgtggccccactggcccacctgctccccgcccagcccaccccagaagcaggataaaacttctcccctgaccacttgcagatgctctcatggtggaattctcacatggccccagaaggcgtgtgtttgctctcagaccctttctgctctgtggaacgtcaccatgcccagggagttgtatccagctctgcctgctgtctacatgcagcaacacaaggaggtcatgtgggattgtaaccaaagtaaggaccacgtatggatttcaaccagagcccacctgttgagatctctggtctagacacatcttttaaaatgtgggcacagaagaaggaggtagatgaaaatcacgtgacaccatcagaggtaatggtgaatccgtgaggccctagagccatttatacatcgtttttgccctcttagtattttctttagcatgtcctaattttaaaagcatcccattcctgttgtgctagacttaatattttggtttatggccgtcttttttagtaacttgacgtcaaacacttcagccttctcctgacaagaggctcgttctctcagtaatgaatagtgacgtgctaaatttagatcggatgcatgttctgcttttactatctgttctgtatgttgctatttgtcagaatgaaagctcaatgtgccagatggctttgctggcttctcctggaaaaagacttcgttctccatcacttcagttgggtcatggttttttagtactattttgttgttaagcattaatatttgcagcagtacccaattatctttttttaacaaaagtgtcacagaaaaagtgtttttggttaaatgctcataaatgagggggaatgcaaatcaaatcccttaacttttattatattacgtaaaatggtggtagaatagttgcagctgtggttttgcaaagataggactgtttccggctgccatgcatgctgtattatgtattttgacagatctccaggatgatgtagaagcttggcctgccgaccagggcctctgggaaagacagtctgaggtgacacagtgctggaaactcagtgtgcttggtggtggaagaggggtttgccttgatctgctgtgggaactaggctggatttccatctgagttgtggctgtagcaggccacctagttgaggtcatcttcctgatcattggtcctctagcctgcttctggcaggacagatatcttttttccatgaaaaacagaaggaaagtattgaattactctggaaacacatacctaaaccttggggtccgattgtcaatggttgtgaagtggtggaggtgttggcgccatggccactgtgccactctggtcccagtgtgtggcccccagagtccttcgggcccttggcctcctgagctcctggcctgcatgcatccgtggggcctttgctagggccgtgtgatcctgctccagtgtttgggccagaagcaagactgccaacatccgaaaccacaaaccagaggaagatccacagggcctttcatctctggggttctctaggtgagaaacagtcaggaggctgagatggggcagtggggaagatgccagcgaagctttagccagccttcggagtaggggaggaggggcccccgctgaagctcttggttcttgcttggattttattcctgtgccttctggatgtgagttatgcttcggaatcccagcctccctccaccccccaaggataaatgggaggcattgattcagtgtttgttcttctctcctgagcatctcagcaacctagtgtggcctcccaagtagggatggagagatcaccccgtccattccccttctttttgctttagcatctacatgggtccagggtcacacaggggtcacgccctccattctcctggtgagtctggctttctgctgttactgttgttttccgcttcctgcgccaccctggctgctggttctcatcagagtggatttgcaaagtagggaggaagagaccaggcagaaggcctgaattttcccactgtgacccatgtgtcaacactgtgtggccggcctgggtgggttcctgctgagttgctccttcgctggaggggtacctccgagcagggcatctgcaggatggtgggcacacttgcctctcactcttggcggggccaggagtctctgttgccactgagtgacgttatgctgggaaatggaggcgtggtgtccgcttctctttccgtgatcctcatacccttcccaagacccccattttgttagtgaagaacttgacgcccagatccacctgccagcatgtgtggccttaggtatatctggcattcaggagccgatgaagcaaccccaaactcaggtcgccccgcgtcccttgctggtggaagcctttccggaaacactgtggtagtgagcctggcttcccatacactgcagggtccctttacagtgaagatggcttcccgggggctttgatattcctggaagctttctcaggtttgtcatggtaccgtccccacacccagggttgtgggaggaagagcacttggtccatgtgaagtggggccgcacatggggtgcatctttccgctgagagtgtggcagtgtgcagagaatgggcctctgctacccctcatcagccaaccctggtggagacccccttgtgccctagacaggcctggccactgaactgagggatggcagccctgttgtgtgggacagccagagacacgggtcagcggctgatttctctgaggcttggagcgtgtgtttgttaaaggcaagaagagtgggaaggagtggatggagtgagcggcagggccagagcctcacttgttgaagggagtggtggtgcattgtgtttactgtcaagtttcaggctggggcgtagatgccgatgtgcaaatgagtaggcagggaagtgagctttctcttattaaaatgttggcttactaatcaagtgttgctgggtgtgattagtggcagaggaaaaggttatttctttctgtaaatatttttgcttaacatttatgcgttaccattgctgattgtattaatactcttagaatgcattagaccaataacttgtttttttttaaaaaaatgtcttggttttaagcagtttcagttggtctttatggaaggacacacagcatttcactgaagcttgagggatctgccaggttcaagtgtaaaggggcattagtttcaacttagagcagctcccccagctacaaatgctgataaaatagctcagaagtgcaagagcctggttactttcagtaattttaggatttagtatctggatctgaattttgaccattgttgaaggagcagataattggatgcattttctaaagtaatgatttaggccaaggagggcagatcctttgagcccaggagtttgagaccagcctgggcaacatagcaagaccccatctctataaaaaaatttttttaaaaaatcagccaggtggtggtgtgtatctgtggtcctcaggttccagagtagctgggtgggaggattgtgtgagcctgggaggtcaaggctgcagtaagccatgattgcaccactgcactcagccttgggtgacagagggagaccccatctccagaaaatgtttttaaaactcggccaggtggcggcgcctgcctatgcctgggtggccagattgtgtgagcctgggagctcacgtctgcagtgcactgtgatcacacccctctacttagcctgagtgacagaggcagaccctgtctcaaataaattaataaataaataaaagtaacgatttaggaaatggctgagaattcccatgaccctcgtgtcctcgggcctggtgttttcacaggggtgggggcgggagaaggggagaaagaaggacgtgctgtctgtggcttccttcttcccaggcattcatttaacaccagctgaacacatttgctttattgattggttgattcatttatttttggcaaacttggcaacttccacctggccccatgctgttaaaaataaagtcttcttggtcgactgaatgcttttgcaattcattctttccatgtagcaattaagatgattcccctagccttgtaccagttaaggataaataggaggttttcaaagaaaatgctgcgtaattcatcggcatttgtgtgtgagcacacgggtaatacatgcgagtagcctccgtgagtggactcctgtgtaaggaggtaaaatggaacgtttttctgcacttatcctgagaagcagcccgaacagtgacatttatacatatttcataatgtggtttcttcaggcacgcggagcaaacaaatcaatttctcagcagtatactgtttaaaagaaacagcaacaacctgtggggaagttgcagaagctgttaaaattaattatatatggcaaaaagatagaacattagggggaaatgttaatgtgggaggatgaaaaaacacagccgtggatgagcagcagtgcagagcatctgatgacagtgtttaatttccgtttctttataaatgtatactgatgaacaacaatggcgcccgcacagggtcctcctgttccgtcctttctccaggccgctgggatcgaatgtccccgtgagcatccagtcagctccacgtggtgtgagccttgatttctgggaacggtaccgtgctgtcttttaatagggatttgtggaaaacgagaattggtggtgaaggtatcgaattcctgagccttgtaatgcaacacctttcccgtggtcaccttccctcttccggttcagctatacgttgtttaactcaaaggaaacctttgttgtcgtgggtagggtgtaacctgcaactccttgaaaaattcagcttgggtgatcagtttcctcagggatgtagggggagaggctcttcagcaggggtgggagggtgcttacaggagggtcccagagctgtgggacaggcttgccccctttcctgggggaagctcgcctctttcccggacactgcaggtttgtaggatataccccttggttcagctggtcatggcaagtgagtcctccctatcacccacttccgcggtggtgggacgcctggggggcatggatggggcctgcgtcctaggagaccttggctccagctgctcgaggccactttgtctcttctgcatgtcgcagaagcgtctgtacctcctggggttggctttcctgtgagcatttgggctccctctgcctgggtggcctgttgtctggagggagtcttcagtccctcttagtgcagcagccaagggtgtctcttctcactccctgagccttctgattcctgtatcaggggaagttaaaaagtgttgtaaatggacttggaccaaggagcaggactctgactacgaacttagaaccttccagagtgatttccgcagctccctgaagcagagctagctccttgagctcattgtccccttaattctgtgcatggcctgcatattgtagatgccccagaagtaattttttgaatgaatgaatccaggctgcagtggggccaggggggtgtggagtgggctgggcacatgtaggagcgcatcgcagcagctgtctggaaggctgggttggttctgtgttagctgggagtgttttctgcagacagaaggcaacccagcatgttatactacctgttcaggggaggtgtgcatgttctgagataatcacgccgtgttcttgagctttccaccgcagggaagtgaagtcatgcccccgcctctcctttgtgcaagtagggcggggagtctaaacccatgcaggtagggtgtggggacccagctgtactctcccgccacctgtgggtgctgctcttgcggcagcctcgtaggtgagggataatgtggttcagccaacctgactacatccaagctgggatgatgaggacagcaagaaggcccactggctctgcaagtcctgtaggcctgggtccctcgagacaaagctcagatggcttctgtatcaaattcaaggacccagcatggtggctgctgctttgctcaccttcagaggcctggaagctggtgtttcctgcatgtgtaactgacggccccagtcccacatttgttaaaaaaaaccttcactttgatgagagtacagtactcctggctttttgtaattcaattgaaactcactgccactccctcattacagcagaagatgacctctaaaccatgacacagggcgacagcttcctctgggaaggaggactcaacattgatttgtgctctgatccccacccccctgcaaaccctgggcttaagtggcagcactgcagaggcctgctgaaggccggaaagccctctctgcctgtgtgtttaaacagagcagattgatgcagagtttgatgtggccaggaagaattctttagcatggaattgcatcataacagtcactccctccaggagccccagcggctctggcacttcctcctgatgtttgcaaggggaaggtaatgattctaattgcacaggacttggtcctggccttggtgatggcaggagggcagagtcctcatggtatggccaaaaaatgtttacaacttgaccttgtcctcctctgatggtgttgaccttggacaaactatgcccctctgagcctagtgcctcagtttccccctcttgcaaatgcagcaggtagtagtgcttaatctcagagttgtggggattcaatgaaacagtactgaacggggcttaacagatacctggtacatgttaagagcttagtcaagaatgactgctgagtctggaatgacattatggggactgacgagggaggctgatgagaggtggcttggtgggtacaatgtgcattgtttcagcgatcgaggcactgaaggccctgacttcaccacaatgcaatgtatggatgtagaaaattgcacttgtaccccatgaatatatgtacacacacaaagatgattgctgcagtagcagcagtaaatgcacacagccaaaggcttagcatgtgggagatgccctgctcgcctggctgggctggaggggaaggtagtacaggttgcatctctccaagccggtacctgtggtctatgttgcaatgaacatttcgatgcaagacgaacggaactcaaacctttcttggtcgtgaaggtctgctgtgttcctgaaggttctgtcttccacctggcacttgggatgtgggttgctcactccttgcccatcgacctggtaataatgttttcctatcaagcagtgaaaggtttggggtttccatgaagcctttcccaaatgtcacgcattggggttttagttgtgagggtgtgctgatcccagccgcagccaaggcgaggtgctggcaccatgctgctgcacccgctcctatgcccacctggacatctgtttcgtaatggacatccttccctgggaacatgtctctactcctttaaatggcttgaggtctctgcaatttgcctgaacattaagtgtgaccaaagagcctgaggccagccatggagaggacgaagacatgaggctttctctcgagagccacactgggagaggccgggaacacggccacttcacatgaaaggcggttagattcaggtcactgggtctggactcctgcattttatggcaaagtctaaaaatgccgatttgtaacaaccaatgttaatgaattcagactgtttgaatttcacactgaataatggctggaattatcagagcccacagcttataagatccctggatcgtgtaatcttttctcaagatttaattgatagaatgatgtaatatcacattacttttattaaaagttctggccataaaagagaaacacctattaggatagaagaatttagtaaaaatagtagtaataacaagacagtttggaatatgtcatatattcagtaaatttcaaaagtcttcatctcatttaaaatacagtattgtgcccatagatcctgaatgcaatacctttgtaccctagggcttcctctttcctacactaaaaacattctatttaaatgcagattttgatttgcaatctaggaagaggattctggaagaatgggaagaaggacaactctgcatctattaattttagttttatgttattcgcgtttttcctctcatccttatctcctccagcccttccttcctgtaaaaggatcctttctaaacatacaaataaagacatgcttagaatttcagcacataagaatgttgttacgccttcttttatttttgtttaaaaattaaattaaaaaattttttttccaaaaatgtttgttcctttgatttgtgtacgtgtgtgcacgtgtatttgcccctgggttgtagccttgtcttgcttttccacacatgctcccagtatcttacctaggaaatgagcggaacagtggaattaccaagtgcagatggtagaacttcccttaccagagcccaagtgacttgtgtgatattgagctttggttactaaataaatggatttctggcttttgacattgtactctgagaattgggtggccaatcatcaaataccatttttttcactgttgtctgcatttaatacagcatcttctgccatacgcacttgtcaattcaaacatgagcgttacattttggtctttatgatctgtcaagggaaaatggaagtaaattctttataatatgctaattgatgtatttgggaatttttagatgtagacaacatctgtgcatgccgttaacacagttaatagctcccgttcttcaatatgagaaggttttcagagtctatgtgtgatctagatgagaccttctgtgtccgcccccccaggacttggcagtgtcaaatttaaggctgttttttctggtgccttaggactgaatctgagcctgcgcaaagtcctgttttgaggatgcttctggccacagtgtgctgggattgtgttggttctgggaagagcctggctggccagacctggtcttatctatcacccccatccctactccgtcctagcctggaccagactggctggagtgatgggtccagagaaagagaccgtggacctgaacagtccttgggacccttctgccactcttggaggtgccacctcccctggtagcttggcaccatttgggttctcctttagccatgggtttttgacaactcaagagcttattttccatacaaacttgttgatggttttctaaggcaggaagcattgctttattgagagtgaggaattgtaccctttgaaagctgccccctgaaaagggagtggagagagatggctccagttggagttcaggatgggggtatctttcagtgaacttggggggagggctgagtggtggagcttggggctcatgtcccaggccttctctggtcaggaaagcagagttgaaaagggcccttttaatctggagggcccagaatggtccagccagttgccccggaaaggaagcctcatgtggcatgcgtgccagacgctgcacagcttgagttggtcctatgtgtgtggcacagccttacaaggttgaggtatttacctttattcctataaattgatggataaggggggttaattgatttctcttggcacttggcaagaacagacgtcagatttgaacctaggtctaggtttcagttgcacacccagcatgttctgctccacagccttttcctaaaatagtttagatgttggtataaacctgtgcgtactgaacgtgcctgaccgtgtgctagtatgatggcttttctacagtgtctccctagactccatgcttgcagaccgacagcgcgtggaaaggaggctttctggcttggtaaatgctcagtcaggtgagcttgctgagtttattgtaagctttgcagttccattccccacacacccagtggtggggatggagggggcgcagggaggaggtggccccagagcagattgagccccttggtctttgctgtagccaggactccaggctaaagtagcacagggtgggcagctccgaggcctgggtgtctctctgtctctctctctgtctctctctctctctctctctctctctctgtctctctctctctctctctctctctgtctctctctctctctgtctctctctctctctctctctctctctctctctctctctctctctctctccccctcccccatttctctctctgttcacccgcagcagccccaggctgcgtcattggcactgtgaaggtgcagggcacaggtacaaataggggggtcttctggccatctttggacataaacccccatcctcggaagcatggcccgctcatccccaggtcctggccttcctaagggctgttaaacacacatcaaccaagtgatgccttacggaccacgcatataccagacgcagctgggtaccgtgtattctcttgatattactatattctcagccaccagggctagtgtatgtgggtgtcattgtcattagcagcctagggagggaatggaatttggggagtagtctgcctaagttccattccgttcactccaagagctgaacacgtgctgggtccacacacctgtggactgatggctgggaccgtctcagtgcttggcaaaaaagaaaacggggatagcaggcactttttgaacattgattactgactgctgctgctgttactggtattgttggcattttttgttcgtttggtttttgagacagagtctcgctctgtcgcccagactggagtgcagtggtgcgatctcggttcactgcgatctccgcctcctgggttcaagcagttctcctgcctcagcctccctagtagctgggactacaggcgcccgccgccacacccagctacttttagtagagatggggtttcaccatgttggccaggctgatctcaaactcctgacctcaagtgatccacctgcatgatccacctgccttggcctcccaaggtgctgtgctgggattacaggcgtgagccactgctcccagcctcgtcggccttttttgccttctgcttgtacctcaaccctttggcaaaaagtaggaactacagagggcctgtcattgagacttcaagttgccaatgcccctcacctattcatctgaactcaggcacatgtacatgctcacacgtgtgcatgctcacacgtgtgcacacatacatctgacatggacacactgatatgcacacgtgtacaaattgtgaatggtatggaccccacgtgaggcatgcacctaaggcgcgcctgtagcagcgggacagagaacaggcttccttgtaccctgtactcatcacgggggttgcgctggcttccttgggttggctttgaggagtgcggcttgtgacttctccacggtagagaactgaggccttagacaaatagtcatccattgtaactgttccctgcagtgttgatagaaatggtgttgggataattagactgtgctgctgctttctccttttctcccaggttgatgagtaggagcagtttaatttgagactagtaaattttgtaattggatttaaaagactgaaatgagcggacctggtttccatattacctttataccccagcgaggggaaatgcttgagtcaggtgtggatcagattattttattgtgccaacattaatattgggagcacacacataatctggagtcagcaggttcatccactactatctcattaaattttcaggcaaaagctgcaaaaattaattggaggcatgtaatagtttagaatgtgtgccagcttatggtaatataaattatgtgaagagaagacagttttatatactgagagagggaaaactggtttactttaatgagaagagatagaaatgtagagctattttttcattacagatacactctaaaatgtttggacttagttgatgaatagagttaattcgctgctacagttccaataattcatgttgcacagtttaatgacttctagataaaaacaggattgaaatgttaatttctcggaagaaattggggcactcttgtatatcagacatctcccccccacccccccattaaaccactagttaattccaccaaacaagtctctttgagctatttcatgccgtgtagacttttgtatttcttacctgggctggctggcttttttttaaaccttaatgtatatgataatcttaggtgacagaatgtgttagagctgtgtctaggcaacctgactcagcagagagtttcataccttttagttttgtaaatgaccacgtgctataacctgcattctcctgtccagtaactgtttcggcagggagggggtttactgggttgtggttagccatctgtttagtcgagtagcgatgttgtcccacttctgagctgggaaataggaagtattgatcagtcagctttagattcatgaggcgatagtctcaaatcatgcagagattttatcactatgttattttgcatctttgttttctttttcacttttcataacttggagacattttttccccatggggtaggttcagcaaagttcactgtcttctttctctttaacctactctcagaaaaaaagacgaaaaggaaatacgaagtatagtaatgaagtgttaactaatagtggggctacataattgagtactcggattttgttgccagagttcttagaacaagaatgcaaacatgtcttatttcaaccatgtgcgtgctgtgttttgctttttttgtgtttgacaaaggggacaaaagaataaccccctaagtattaaggagtggagggaaaggagatgagcccccactccctgcgctcccttcctggtttgcctttgggtgtacagttcatagggcttcctagaaacggctgcgttagggccgagggggtgaagacttggcaggacttcctggcagaggcaaggactcccctgcctcccacctcatgaccattgggccttagcaaggcttagtgaatcctgagtggggtcatctttagcctaaacctggagtcaccacagagcttttgtaaacagtgagaaacctactacttcctacagaaactgtgctgtctgcaaagctcagcgtctgctccagcctgaatccccaggccctgtccctgtacacacctagttttgaggtcaggacatcacaaaacatctgccaacatcgaaaagtcatcaggagccacccagacgtggggtgtattggtgggaagaaggagcatcttagtctgcttccttctgaggcccacagttccagaaggactagcgtcctcagagcatgtggtagtggctgttcttgtcttttcctggtggtggggcctggtgacccctaacaccaacggagctgttcccaggttcatttcgtccctttttctgtggtgagatgaggctcctcctgccctccttgctgggtggtctttctgttttgaccacatcccttggaagcgtggctgggctgcgtaactccagagcagcctggtggtagctggggctgccttctgagtttgggctggtggatgctgagtatttgcattcagagccttaggcattgaccttggctttctgggaccctacgcccctctgtttgcctttgtcagtagagaccttctcacatttagggattcattttttccaagatctgtttgctaggtgtgtgtcaaacttcctcccagagcagtgacatggatgggaattgtgagtgtgttgagagacctaccctaaaagatggggctgcagtcatcctcaggggacctcctgttctcagctccacctcagccacacttggctgtgggtcagcttcttctgaatcagcatccgcaggacagcgccacccagccctgccacacttgcttcctccgcgcttcttcagaggctggagcccacccccatgctcgtcgtctgttctgcttttttgatgcacttacttgtccctttcagcgtattgcttatgtcctatgttggttaaaaaaaaaaaaaaaattgccggtaatcagccccagccatttctcagcatttctagtttggaacttcagagacttcaacttacgattcctttaaggcaggagtttctactttggcactgttgacattttgggtctggtggttcttcattgtggggggctgtcctgtgcatcatacaatgttcaacagcatccctggcctctccccacccgatgccagtgttgcctccctccccaccccggcatgaccagagatgtcgccagatagggcccagtgtcccctgcttgagagcccctggtgaaggggtagaagttgattccatggcccttgtcacactgtacttgagccataccgtgcttggcacggaaaccaccctgtagccgttgtcagaggtggagcgtcctccctgaggtgcgtaacccccacatcatcgttgcttccttgggctgtgttctagcgattgcgtccgtccctttttctccttgattgcagatggaagggccctgctctgagccgtcgccacatgcctggtgcttggctccatgatgctcacatgggtgttcatgacagtgcatttgacagacagatttatttgtcaccttgtcagggtgacatgttgggatggctccaccacttgtgtgccattgacacttggctgtctgaaatcaggacaaagcatccctgagactgatccgaatgaggcttatcagcaccaggcgtaacttaccgcctgctttcctctgtttctttaacttttaattgaaaccatttagttaccacccctgctgctaggaatctggggacaattaggaaagtcccatctgtcctttgaaccacattatattgcgtttctcctcgcaatctcaagaagacggcacattctagcagcagtgtctttgccttgccgtctcgcctcccactggatggtttttatctcacttgaatgagttatagcaactctttaattcaattattttctccagtgcaggctttgagatgatttagttgaatcaaacacccgggttttccaatgcagagcagtgactcccagcgaggccgtgggagggtttttacattttcacttccagccacggttgcgcgcgttctgtgctgccccctgagcgtcctggcacaagcccctacttaccattccgaggagtagattggaaatggcagatgccgtgggctttgccagtctttccccaaggcaaggaattatctgtccagtgatattaggtcactgcattcccacccagctgtgtcgaaagaagggagggggtggggcagcctgggtgatgggcaggaaggccatttataaattcaagtgtggtaaacagtcgactctcctgctttggtatttgagtttgaattaaacaaagtgtcgtgggtgggaggtgtatcatacgatcattttaaccattgtgccttttaatgtggaaaatctgcccaaaataggacctgctgcagtggttttcacatatacaaagaagtggctagaatgttctctcagaacagcacacaggattagaaaggacatttggccgctggaattcttcagtgagaattcagtgattaagcctgccttctgttttccttgtgggccgcagggttcctgtggatgtccccaccctcagattgctggagtagaaaacttaactttccaaaacactgagttgttttcagcccagcattagaggttaaagatgctcatgtagaaagcacgcaggatggatctgacgaaggaaacagcttctgatacttgagcaggctttggacagtgcagatgaagggggctgagatactgaggcagtaaagagaacggtcagcttggggtctggagtcgctgggcactgagtgcgcgttctgagtgccattcaagcaccacgtaacggttggggctggtgttgggtcctgagatgggccatgggccaccgttaaactcaggaagcacgtgctgcccccccccactctagaaggcgggctgttttcctggcgctgtgtgtgccatgctttgtgtgaacatctcactgggtgtcgctctcatgtggtaactgggcatgttgtagaagtcgttgctcctaaacgtaagccagtgcccacattgggtacgttctggaagaaacagtgtggcccaacatgggcttatccagagacaggacacctgctgcctggtgacgtcaccacctcccgatggcaccactctgttctactccactgcccccggggcctgacttgctactatggaactaaccctgtaggatgaggccgccatgcccgtgtgtgtgtctgtccagatctgtccccacatacttgctggtggcgggtgggaagaaggttagataagttactgtcatagattgtgactatgaagtaatccattagaatcttcagacaaggaatgctgggagtggtggctcatgcctgtaatcccagcactttgggaggtggaggcaggatggatcacttgaggtcaggagttcgagaccaacgtggtgaaacccatctctactaaaaatacaaaaatgagctgggtgtgatggcacgtgactgcagtcccagctactagggaggctgaggcaggagaatctcttgaccccagaaggcagaggttgcagtgagcagagatcatagagatcatgccactgtactccagcctgggcaacaaagggaaacttcatctcaaaaaaaaaaaaaaaaaaaaaaagaatcttcagacaaggaaaccatgctctttgacctagtaatctcccttccccacccaatgccaagaaagctctaatgcaccaagattttagttatggtgttacttgacagcaaaaagacagatgactcaagcatccaacagtgggaaaacagctaattctttttcaaatgatgccttcacagtttgaaataagtagaatgcttgtcttaaaatgaaaagcttcaatatcaaatgttgaacatttatgaatagaaccataaaaataatcatgggggaaagctgatgaggagcagttcatagtgattatctttagttggtagaattttgggtgatttttttttccatacccactcctcctccccaaatgttctgtaatgaatatatgtttgggtttttttgtttttttccaagacagggtctcactctgtcacccaggctgtagtgcagtggcacagtcacagctcacagcagtcttgacctccgggctcaagcagtcctgcctcagctccccacatagctgggaccacaggcatgcatcacgatgcccagctaattttttgtttgtttgtagagatggggtctccctgtgttgcccagactggtctcaaactcccgggctcatgtgatcctcctgccttggcctcccaaagtgctgggattacaggtgtgagccactgcacctggcctatgttactttttaaatagggaataaaatagctggtcaccctgatgcttccaaaggaatcatgcatttgttgaagaggggaacagtgcaatgcaagatttacgaagacagagctgattaccttccctccccagtcctcagatactgtctttctccttgcctttaccaggacgtacaagtgcatctgagcatacggagggtgtctgtgttggcttaccgaaaggagtcctgttactcctgcattcccattcgatatggcagattgtgcatagatacctctgcagaccagtaggcctctccaatacttttctttccctcttactgcctttgggcatgtgtgcacacccaggattttacctaagtggaatctgtacttactatggttttggtttgtgttaagtcatatcctttgttttttcaattgtctcttttggcagaaccatgtatgctagcatccagctgcctgggctcaattcctgcctctgcctttggtagctgtgtggcattgggaaaatggctgatcttttctttgcgccaatttcctccttaaatataagtaataatagtacctgttttataagcttgtaaaggataaatgacttagtacctgcaaattacatggaccagtgcttggagacgtaagcactttgccaacttgctgtcagtgtggttggttattttcccccatctccccagttttgttttgttttgttttgttatttatttatttttttttttgagacaagatcttgctctgtcgtccagggtgagtgccagcacagcttactacagcctcgacgtcctgggctcaagcagtcctcccacctcagcctcccaaatagctgagactgcaggcatatgccaccatgcccagctaatctttaaacttttggtagaggtcgggtctcactatgttgcccaagctggtgtcaaactcctggcctcaagtgatccttccaccttggcctcccaaagtgctgggattacaggtgtgagccaccacgctggccctcctcagcttttttttttttttttaaataaccattattattccatattttttctatgaaatcatttataaacataaaatatcttaagtctgtaattcagtttatgatacatattcagttatgatacattctttgcatttcactgtttcatgtttcagccaaatcccatccccccaacctttttttttttttttttgagccagggactctctgtcgcccagactgtagtacagtggcatgatctcggctcaccgcagcctcttcctattaaagtactgggattataggtgtgagccaccgtgtctggcccctatccctctattaagtgcctttcagcaattctgtttttagaggaaaattcctttttgcttctgcttgctccttttaccacccctgcccatgaaagggggagttacctgtccagagcaagtatagctttggccgtgatcttcaaggactattgcattggtgctgactgctggggccccttggcccccaggttcccaccagtggagcaaacacgaagggtgcagcctagtcggaagtgttcccaaggacaacatcagtgtgcagacttccaggggaggggcatatgaaactgagccaacagaggccaagatgagaaccctcctgtgacatggtcccacccattaggccattcccttggtcagctggatggcaaatactagtagtgtatgctatggagcagacatttattaagtccctgctgtgtgtcaaggattgagctaggactctgcaggaaatgcatgtgtagttcagtcctggaagctgcccagcttccgcctcctggaagcatccttttctccccagctgctctcgcctgcacatcttacattctctggctggtccttctgggtgtgttcagccactttgagctgtgcctgcctgatctgcacactttgcaaatgtgtagactcagaaagagaaacagcccaaacagtggccagaaactgttcttggaggctctaggttgacaaaagggtcctttaatagctccaggttgacccctcccctagacacctgtgctccccctgagccacaccgtgacttcggaagttcaactgtcatccagtttggtcggctctttcacaaaataatttcactgattctgtcaggcattttcattactttgatttaaagtttttgtgtcaacctctggtactttagaatctccagatgttgaaaaacaaaatcccattggtaatgtttgttttcctttacacttatgaaaaaagcaacttttattctcgcctaaaatttattgtcgagagcacgtcttttaaagtaaaaaaatgtttgcagcatgtcatacggctctgaaatactatgtaggtcgcagcttgttttgaggcataagtgacaaatatacttgtgagagatgttattcttaccctattaaagaaattagaacatggcttttgtgtctctgatactgattttatatcttcgcaaccgaatttgtgaatcccagctagagtaaaagacacacgtgatgcatgaagaaagtgaaatggttctgtttggtatttatctcatcttgatctttggcttggaagaactgataatgaaactctctttgggaggacagagagctctggggcattcatctcccaactaggtctccgaatttggtgcagttcttgaaggcaggtgggtttacacagtggtgagaagtgggaagtatgaagggtgtgatcttcgccctctttttgtatgcccgttaacaaaactcaattgttaggcgttgagtagggctattgatttctagccaacggaaacacttactgtgtaatttccaggagagagacattttcaggtgatgtggactcattccctgcagttcagaaggtaatgagcaatagtgatcaatcctgaggttatccggggtgatttcagcttgtccattgcattgattgataaatggcatgctctgaggctgattgagtgatgaccagcagcatcaaagaaaaccctcagtttgcatggcgggtattagaagtggctgccttgatgcctcctgtcatcgtttgagtggtaaagagacattctttgtatgtttataactcttgatttggggtcatggttatcatctgtactaactgcacaggtcatcccgctcccatccctttttcattctttagaatcccccacagcggtccacgccccttgccaacttccttccactatcctggttctgttgttactcctgccgactgcagtgctgttccgtgagcttcttgaatgacatcgtacagtatctccgacgcacagtacgtaccagttacagttgtcttgacaggatctcctgtgatcttttgtcccttttcagtttagctcttggtggctccataggctctcaagcatcctggacagttctctgtgggctggcgtcctgggtcagattccagggccggatgtgagctgtgccttgaccatttgaagagctcaccgaaggaggtgggaatggacggtgcaggaaagtaactcaggcacccgaggctgctgagcccagagaagaagcacctgtccttggagtattgttccaggaaatggggaggcaaccggttccagagggcagaactgggttgggagacaaggaagcacagttcttgtaaatcaagaaaatttgtaaagccacataagctgtccaccagtgagagagagcatgtacatgctgtgagctgcagtcaggccgcctggccacaaggcatgttgtggcatgctgtgggagtcggcgttgaagcatcccagagacctcttgtgcttaaacaaagctgagttattcagcacactcctagatgtggggtctgattgttggtcaaactgaaggactcgagaaaatgaggactaagtggggggatgagagacatgtgagtgggtgttgggccagtagaatgacaaaaggagcaggcccaggctctttggaagacagacctttgcccttcagggggactgggggagtgtttcctggcaggtgtggacattcgtcctcatggatgtcttctttataataacctgtggaggacggcccagcgcatcatgccactgaccttcactgatgcttctgtacttaagaagtaatgtcccttggctgggcgcggtggctcatgcttgtaatcccagcactttgggagctggaggtgggcgaatcacctgaggtcaggagttcaagaccagcctgggcaacatggcgaaaccccgtctctactaaaaatacaaaaattaaccgggcatggtggcaggctataatcccaggtactcgggaggctgaggcgggagactcgcttgaacccaggagttggaagttgcagggagctgagatcacaccactgcactctagcctgggtgacagaacgagactctgtctcaaaaaaaaaaaaaaaaagaaagaaattgcccaaattttcctttcaaggttgaagttagggctgaagaatcagggctggctcatgatctcttcagactcagtcatccatccattcagagatcgtgtgtgtgggcgcacgtgtgtgtcgtggactgttcctcaggatccgcaggtgcagtggccgcgctcccactgaacttgtgttctagaggcggagccccctccctgagggcctggctttctcagtgtcaagtggagagcatgttgtcttagtctgctttggctactataacaaaattccataagcaggtggctcatagcaacagaaatttaattctcacaattcttgggaaatccaagaccaagatgccagcagattcgatgtctgatgagggcccaagttctggttcagagacggtactctctcgctatgtggaagggtcaaatgagatcttcctttttttttttttttttttttttaaataaaattttgctcgattgcccaggctggagtgcagtggtgtgatctcggctcaccgcaacctccacctcccaggttcaagcgattctcctgcctcatcctcccaagtagctgggattacagccgattaccagcacacttggcaaatttttgtattttctcctgcctcagtctcccgggtagctgagattacagggattgctggatcaaagtttaccacgctcgacaaatttttgtatttttagtagagatgaggtttcgctgtgttggccaggctggtctcgaactcctgacctcaggtgatccacttacctcggcctcccaaagtgctaggattacaggcattagccaccgagccttggccaaaagagctctttcatcaggcactaatcccgttcatgagtgctccaccctcatcatctaattaccactcaaaggcctcaccctctaataccaccaccttggggatgaggctttcagcataggaatttgcagggggacacaaacattaagaccagagagatactttggactgaggggaccctttggtgagaacacagggagtggttctctgtggggaggctgagattggcgtggcaggaggaggccagccatggggcatctggggaaaggtctggaggccgaggggctgtacccagggcaggagccagtgcggttgtggccctgtgagggcagacccggatcttgaccacgaaggcactgggcgttgctggagagcttccagacactgggctaggatcacatttcagtttccagtgagaatcctcctgggtgtctctggaaaatggcttggaaggcataagagcagaaacaaggggatcatttgagtgaactcatatagtagcagagctgtgcattgagattacccacaccccagctgcgagagtccctgttaatgcaaggtggccagtttaaagctgacaggactagatttccccatggagtgatttgctgaaggctttgggctggaagttccagcgcccgcagaaaacttactgttggaggttcttcgccctcgtttctgaaggaaagctcccagctctgcctggagcctgggatggaaattgtctctggttaataggatctttaagacagctaaatcctgcactaaagacttgatgcaactgctgttgcacacggaggtggctcccctgccatatgcccgcagagctttctttcattgtcattacagagagtcaggcgtgtgtacaggaaggagacgggatcctgccgtaatgactttgtcttcaccatcttttctcagctgcttaaattgctgtcagggcagcgtaggaatcttaaaggagggagttttctctcatataattatgctgttggtaaaaatgttggcggcttttctctacttttccccttagccaccaaaataaaactctttatcttggaactcggcagctgtttgcaatccgcctcatttctcctgctgatgtattggtgtcgcagcttgggtgatgggtggtgacgtgagggttgaaggtaatttctgtcgcagtcccatggtcatgagccaagacctggagtgctggaggtgcgccaggtcgggtcatctttgggttttgcccagtgagctgttgctaaggagagggctttgtttgcctagagctgggggaaatgttcaagggcaggcacacattggcagagatctgctgacgtggcgacggcggaactcatggctgtgtgtcaagcctgggcagtaacaggtggcgaaggccaaacctttgggggcagacttggggcagcagtggagacgtgttttggggatctcaaggcgtcttggtgggaaagagtgccggtgggtcaggaaggcgggggtgctgggacactgctgctgcttgggtggggtcaggacctgctacacagataccagacccaccctctgccaggggacacagaacgggcaaggagaagggctgtgcttctgagtgcttcactggtctggaaacccatgttttaactggggccacccccggacccctgagactgaggtggtgtgaacctcagggctggggaggtggcttccaggggaccacctcctcacgccctcccttcccagagaggatggggaaggtttgggcgggagcctccggactggtagggactccacctagaggccagcccctcctggggtaggcacagaggcctccagagcgcctccctctgagtcacattccttctcatttagtcacctttccttccacggggctgctgttggctcgaaatagaaggatgactggaccgttctccgtgcagcttcttccctgagatgttccccaagcccctcaaggcatcctttgtgatgcacttctaaacagcagccggctgggctcacagtggctcacacctgtaatcccacgactttgggaggccaaggcaggaggattgcttgagctcagaagttcaagaccagcatgggcaacatacataacatctctacaaaaaataaaataacatagtgggctctcttctctacaaaaaatcaaaaaacgtagctggggccaggcgccgtggctcacacctgtaatcctagcactttgggaggccaaggcgggcagatcatttgagattaggagttctagaccagcctggccaacatagtgaaaccccatatctactaaagaatacaaaaatcagctgggcgtggtggcgcatgcctctaatcccagctactcgggaagctgaggcaggaaaaatgcttaaaccagggaacggaggttgcagtgagcccagatcgcaccactgcactccagctggatgacagagcaagactccgtctcaaaaaaacaaaacaaaaaaaactttagctgggtgtgatggtgcgtgcctacagtcacagctacttgagaagctgacgtggcaggacggctggagtccaggaggtcaagactgcactccagcctgggaggcagagtgagatcctgccttaaaacaaacaaacaaacaacagcgagtgtatcctgggtgcttgttcggactaaggtgcaaacagagggctttgcgttatggtctttgatcctggtggcattttcattagactagatggtcacggtaatgtggtatcttttccttttttgtagacaggcgactgagtctcagagggcggtatcctcgcccaggtcgggggtctgcacatggctgtcagtgttgtgtcctcggacagccctgtcctgggaactcagaggctcagcagtggtgcctgtggaatgggcctctgttttcaccgagtagttgaccccatctggcacgacagggagactcttttttatccagaagccaaatcaagagaggcttttctgagtgacttggctgtgcttttttccagctttggaaagtatgttgagaatgcgtgctggccctggtggtcttacgttgttggtgtcagatgtaaacttgcgacgtgaaggcagaatttaagtctagctttatttagtccaacacgtgttctgcagcagccgctggctgcagagccaaggggataaccatcccctcccagtacttgcagtctggtggggaccaaccccccagagagatggaccctgtgctggctcagagagagagggcacttaaatcttgcttggtgtgctctgggaaaccctctcctggagcattggcttctgagctgaattttctggagtagaaggtaatgccgaggcctgctggacatatgtcctgtgaaaattctcagaaaggctgggtgcaggggctcacgcctataatcccagcacttcaggaggccgaggcgagcggatcatttgaggtctggcattcgagaccaccctggccaacatggtgaaaccccgtctctaccaaaaatacaaaaagttagccaggtgtggtggcgtgcacctgtggtcgcagctactcaggaggctaaggcacgaaaatcacttgatcccacgaggcggaggttgcagtgagctgagatcatgccacttcactctagcctgggcgacagagcaagactgtttcaaaaaaaaaaaaaaaaaagaggaaagctggcagaatgatcatggatacagtgtgcaaacgtgacttgtgcagccaccatactctcctcatgggggagtaaaaattagctggaaatgatacctgaggcaagaggcctattaaatcttattaataattgattttagtgggaagtacaagttcagtacataaagcaggagctttttggggaagttactgagttttttgtcttctccagagagaggccagaagggcagcatctccaaggtgaatctgcccattggctgtaaggagcatggacgaggacttaagaggcagcccatctggccacatctccaaggcgaggctgtccactggctgtaaggagcatggatggggattttgaagacagtgtgtcccggagccggcctgcagagacaggctgcctggggggaggagggcagcccccagctccggcgtggccagccctgaccttgggccatcagggagggcacgccaagctttgtgactttcaggtctgttcccttgcccacgggctggttctggctggtttctggactgtactgtggccgtgtggaattctctggcacacagcagcaggtacagagcctgcccctgggcagcgctgaccatgctggcctggggtttggatacttgagcctgggtagagacagggtgggttctcggtggccacttcctctgcagcagccaacagcagagacagaaggaggcctgggaccttgccctgcctgacccgcctgtctttccatctgaagcgcccctgacatgctgtgactcttactttatttttggtagtttaccttaaagagtaatgaaatcacattgcaaaaatttgggttctctgggaaaatatcagtcaatcttgattctaaaacttgaacacaatcactgtggccattcatgtctattttttttttccctttaactttttcttttgacataattacagacttacagaagagttgtaagaatggaacaaagaatttctaattaccctttacctagcctctccaaatgacattttaccacatttgcttgtgtttctctcatatacagaaacacacgcacagagtatataatcttcagatccctctgagatatttgcaaatatataaggctaaagtatttagggatggaggagttaatttttcctaaacacagtgcccattctttcacataagacaagtatcaaggtcaggaaattaacattgataatcatatctaatattcagatcttactgattttgccagtagtcccaataagatcctttatagcaaaagaaacttcggattctgcgttgcctctggtttccttgtctctttagtcatctttaatctggaaccgtttcttgtcctcctttgtaccatgacattgatgtttttgaagagagcagatgagtcattttgtagaatggccctcagttcagtttgtcctgtgttttttcctgattggagttgggcactttgggcgggaatgctcaggacccactgttgttgtcagcacagcggattaggagggcacatcatgtgaatttatcttattattggtggggttaactttgatcacttggctaagatcgagtccgtctttctccactgtaaagctattatctcaatctccttttttttttttttaagtcctgtacatgattttgtgcatcgtaacataccaggtctgggtatgggatgtgggaggcagcgctgtgcccttaatttgtggaggtgacgcatgtgcagttgcctccactgaacgttaaaagtgcactcctgtgaccctgagttgagttcagagactcctatcaggtcagaagagctcctgctgttgacctgcagggcacagcttgagacctaagtctggcccttccagatgggccatggctaaggttccctcattcaataaataattgatgacttcagctgctgtatgcatggatttcttgcgtgactatttttccccctttttaaatttcttatgtgcgtctggagaccctttggcagtggggcctggagctccttttagaaaagatccacaggagattgtgtttccaatgatgacagccaagatggcacaggtggcagccctcccatgctaggggtgttgtcaggtcgacagcgctcaatccccattgttccagaacggccagaggacagtgaccaggggcagaggagagtgcactctcatggcccagcccctcacttagcccacctgccctgggctgggtgcactggtggctaccactgcttggtaagaggtacgggtgacagatgtcttggttgacggtgtgggtgtgtgttttttttttacccctaatccaaggaaactgggtgtatttctctttgtgagttttgactgctgttcccctaagtcaagttatatggaagcatgatttatcttctccaaaaaatatgggcccctcagtgaagttaaacagagtataaaatgccttcatggtagttaaatttatactctgttaaaatgatttgtgcactttgcagtaagctgtgatattaagtgcataaatatacagcggagttaacttggaggaacgttttatttgacaggatcacttaaatgctcaggtacagtatcgaaaccatttagcatggttaccaggaatggagggtgagccgactctgtttaaaatctgcagaaaacattcagaatccaaaggaaagcttgtaagtaagtacttctccatggagtgcttaatcgtggaagtggttttcatcacaggagagaggattgcaatttctaaatcagtctccctgcatcatgtgagaaaatgccttgtaaataaactctccattggaatagtcacttgtcctaagcgtggaactgattctattcaaattagcaaccattatagatattttggtcttctattgtcaatgacaatacattttcctgtgggaataggttatttagtccatattgggacattacaggagaattaataattaatgacatgctagtgctcggcccacccttctgtttttgtagccaaggcttgattggattttctgtatgtataatgggctgtttcaaaatggtcttgcctcattgtttcttcatatcttattgaaaccaacccactgttgatctcaatctgtgtaaggagaatgcggagtatggcattcgcaggactgaatccctagattttaagtttggaaggagatccaaccgggcagatgaattgaccggtggtgaatattctgtagcattttcctccctggagaggaatgccgccaccgctgggaaccgtggactggcatgtgagccagtggctgtgaaaggcgctgtgccctgtgtcctccgtgtactttagagcaggagcgtcacacatggtggagccgggtgatatcccgggcaggctcccgaaagctcctggtggcccatcaggggctggtttttccaccttttttttttttttttttttttcctcgagacaaggtctcactctgtcacccaggcaggagtgcagtggcatgatcttgactcactgcaacctttgcctcctgggttcaagcaattctcgttccttagcctcccgagtagctggcattacaggcactcgtcaccatgcccggctcgtttttttttttttgtatttttagtagagacagggtttcaccatgttggccaggctggtcttgaactcctgaccccaaaatgatctgcccgcctcagcctcccagaatgctgggattacaagcacgagccaccgtgccaggcctggttattccaaattttttgattggtctaaaatttgtaatgaatggtaggaaaacacagcaggaaaaagaaagaacattattattggtaagggtcagattaagccctgggtgagagtcatgagtccctagaggtatctgaagaagtcctcctggctttggccatctctacaggatccggtgattgctccgcctccagagctgtccccaaccatcgcagcttggcttgtctgtgacctcgtgtcaactcaaaacagcactttccccccgacactttgaagtcaaccctggtagaatttgtgaggaaatggccagtgtgtgttgggtttaaaaaaaaaaaaaggctgtggaagtagaacaatcttggggttgccacagaacaggcagtttgaggtgacgaagtggctttgtaatcaataataattgataagaccttgtttctagcaggctgtagacaaaaataatcttcttggacctatcttcgcctaggaaatatgtcctagaacctccctcctctgttgatctcaacgcccaagcccatcctcccatgagaaaggtttttttttttttttttttttgagacggagtctcgctctgtcgcccaggctggagtgcagaggcgcgatctcggctcactacaagctccgcctgccaggttcatgccattctcctgcctcagcctccagagtaactgggactacaggcgcctgccaccatgcctggctaattttttgtatttttagtagagacggggtttcaccgtgttagccaggatggtgtcgatctcctgacctcgtgatctgcccgtcttggcctcccaaagtgctgggattacaggcgtgagccaccgcgcccggcctgagaaaggttcttatgggaattgtgatgaaggggtcagagcagcccccacctccccccatcagcaccacccagggctgaatctgaagtcagacttggctgcttaagccacaacctaagataactttgaataccaggtgctgaaatcacagaacagactccaaatggtggccccgtttggactaaatgagaggtgagctgaggttgaacacgggaggcagagggccaggggtcccgtgggcatcagctggggtgggcatcaccacggtgcccccagctttttcatgggtgatttcttcagctgacctgggttttcagggttcttttaggcaggctcccagttgtttgtgtcagagagccctttttgttggtaatcccaagcccagaactttccagaatgtgctgttggatgtggctttattctttgatcccttcaaaaaatgaaccacaccgattactattggctgccaggcctggtgagggggtgagtgagccctttctgcgagcccggggagtttggagccagatgggggttcttccttccccgtctccagtcctgttgctctaagaacacagataagggagtcactccatccccaacaggtgccgccttatccctgctgatgtcagaaaccaactctgcagaaaccaactcttccccagctcacacatgctggaaacgctgaatgtgtcttataccctgcatctcattacatgtgtcttgaaaatgtggcttttctttatgtatataaacctacattcacagctctgcacaatcagtggcttgttttccgcttacaatagcgacattttggtggtagcggtgcctgacacgcatttcatttttatttaacttataaaaccttggggtgagtgcttctggacacacaaaagctttcatggagtgcaagagtggtgaattttttctcttttcaaaatggaggcgtggcgcatctggacacacacatcagttggcctgacctgtgcgttcgctacaggaagtaaaagtttggatgacatcactgcagggttatttcttgttattgtaattaatggaccagcaggaagtagcgagacagatgattcttggcagaaatgaccatttaaagggggaaggatgaagagggtctgggaaggaagaaacctttctggacatttaaactctccagggatgaaatagggaaatacgtagacagtgcacaaggaacgagccatctcttgccagagtggatataaaattgttaacccctgctacaactcagtttctgtttttctctctgccttctcagaacaacgccgacctgactggcactgggttttgtctggtccttttgtgccaagtgtgtcttccacgtcaggtcggtggcaggagaactcggaaagtgaagtctgtgctgcgtggagaggcgcgctgcctctcaagtcccaggtgctcttttgtgtgagtggaaggagctggaaggagtgtggggctgtgatgaaagaagggaggtggccgagttcctggggaaagagctgagtggtgacagtgttcctggacagaactgaacctagaggagatcttctggacccagaggagatcttgaccctccttgaagttgagcctcccatggtgtgtaggggccagagctgactgggcgatggccgtgctcccaaagtggttgagctggggctagaacccagctgctgcctggaccagccttccagggccagtgtcacaccccagcccacctgagtggagttgacagggttggagccttaagccacgtttgctcagggtcgtcttctgtggcccagaggtggatgctgcctgtggtgttaagggatgatagtggggtaatgggggtctggagcttgggaaaagaaaggaatagaggaggctcctcatgggagggagggagggagtagttcatttctgtgtacggttccattgtgtgatgatagcacagattatacacccattctgtgcgtggtcatttgggatttgtagctttgagctgttagggatgctgctgccatgatcatgtcatttggtgcacatgtgctacacgcatgtctgttgagcacatacctagaagaagattgctggcccattgggatacacatgctcagctttggtagaaaccgcctggtggttttctagaagagttgtaccgatttccactcctgccagctgcgcatgggagttgtgttccacagctttggcaattcttagcattatcctctgcatttggcaattctggtgcatttgtagtagaacctcagcacgttttaatctatattttcctggtgcatattagataccttttcattggctatttgggtattctcttaagttcctgtcaagtcttttgcctgttctaaaaattgctttgtctggatttttttcttaccgtgtcttagtccattttgtgctgctgtaacagaataccacagaatgagtaatttataatgaatagaaattggcttgcagtttttgaggttgggaagtccaagatcacaaggttggcatctggcgagggtcttcttggtgtgtcattccctgaccaaggggcaaagagagaggagaaagagaaaagggaataaaattcacctttttataaggaacccactcgcacgataacagcattgattcattaatgggggtagagcctcatggcctaatcacctcattaacgccccacctcccagaatgatgggggattaagtttccagcatactcttcttgggggccatatgcgaactgtggtatactggaactgtagaaattcttgatatattctagatggaagaccattgttgcatatttttactgaaatatgttcttactttgtattgtcactctataatctttttgatgagcagaagctttttatgatggctagtcttagattttatggttgatgcatttgtgtcttagatcaccgttgtctacccaagatccttaggacattctcctttgttttcttttaaaagtttggtttactttattgagtctgcctggcgtcagttaggagtccaggttcccacctattattgttttctcggctccgcctgtggaagtcgtagtcaaggtaggactcatggttccacaggtggctccagtgtcactgtgccattgagctgccatctcagctcattgtacttctctgccaggttaaacctgtagctgatgaggaacagccctgagtgatgtgtggggtccaagttgttgagaagggccaaggaaacggaagtactacacagagtgcttcaaggtaagaaagaagttactggagaacaacactgaatacatgctgtgcactctgaaacgtacacccagtcacacttacttcaatgtgaaaaggacagtgttcgccaggcactgtggctcatgcctgtaacccagcactttgggaggccgaggcgggcggatcacctgaagtcaggagtttgagaccagccacggtgaaaccccgtctctaccaaaaatacaaaaattgctgggtgtgatggcgggcgcctgtgatcccagctactcaggaggctgaggcaggagaatcgcttgaacccgcgaggcagaggttgcagtgagcagagaatgcaccactgcactccagcctgggtgaaaagtgcaaaactctgtctcaaagaaaaagaaagaaaaaaagacagtgttcactgcagagggtgcatcccagctaggtcttcatggtgcaccagacaggtcattgcctacagccaattgtctgcaggggatccttgttgccctgagctattttgttacattcttccttatgttcactatattctctgagaccttcatgtagctgctgctttcaggagactttgccttgagggactgattatcatattcagagagggggaatgctgctggtatctagagggtagaggccaggcttatgaacataccacaatgcacaggaaggccccccaccacaaataattgttaagcctaaaataccaacagtgctgagggggagagatacagctgaacaggtactgagaacatccccagcattctgtggtgctgggtgggattgaagatcagggttcacggtttccacgcctgggccgtgggagtaagaacagaccgtcctgggaaagatgacatcagacagactccaaccagcaccagaccctgattgggaggagttttccctctcatatgtcgccatgtccggaccctttccggggggcagcacgcagagatgctggccattttatgtgtccagtcctggtgaacttcactatgttctaagagaaatttacttgtatctttctttttggtgaaacttagctgctatagccataacaatttgtataaatgcctatatgaatcaaggcagttgactttccacctaaaaattgtttgccacgtacaaatcggtttccaattttattaacatgtttatcttactttaaaaaataaatcccatttgaaagaggtgcagaaaccagccatgcatgatggctcacgcctgtaatcccagcactttggggggccaaggcgggcggatcacttgaggtcaagagttgaccagcctggccaacatggtgaagccctgtctctactaaaaatacaaaatatagctgggtgtggtggtgcacgcttgtaattccagttactcaggagcctgaggcaggagaatcgcttgaacctggtcaattgaactcgggaggctgcggtgagccaagatggcgtcactgcactccagcctggcgacagagggagactccatctcaaaaaaaagagagatgcagaagccattgaagaaatctcatcgtgtttttgagcttctaagtggacatcatcaacattgagattaagaaagaaagatgatgtaaaatgtaagagagtggcccttgccattgcagacactgatttattgggcagggccacatctgaagacttgggcgagccggcgtggaactgctgtggctgttagctttctctgacactgtgttcttgggctctggaggtgggatctcagctgtttgccattctgtcatctctatttattgcatccaaccgttagtaatgacttaaatgatgattgccaaaactgtagtcaacagttttgttagtgatttggggccttgtaaaataattagtcctgagacatgtatcaaggggaacatactgaatatctgagactagcttttacttgatttgagcctgcaggtcctgctacaagatcctgtgtgtgctccagggacctgcaggcagttacttggggaatcagccatgccagtggtaggtggtagttcctccccagctaccatgagggccccaagcaattggcatctgtttctttgttttggccttcttgtcagtttcctttttttttttttttttttttttcttttcttttttgagacagagtctcactctgcactctgttgtccaggctggagtgcagtggtgcaatcctggctcactgcagcctccgcttcccaggttagagcaattctcttgcctcagtctcccgaggacctgggattacaggcgcctgccatcacacctgactaattgtttttgtttttagtagagatgaggtttcaccatgttggcaaggctggtgtcaaactcctgacctcaggtaattcacccaccttggcctctcaaaatgctggaattacagacgtgagtcactgcacccagcttcgtcaatttccttttcttgcaggacagataggagctgtacgtggattcctttttcttttttgagacggagtctctccaggctggagtgcagtggcgccatcttggctcactgcaaccacagcctcccgagtagctggaactacaggcgcacgccaccatgcctggctaatttttgtatttttagtagagatggggtttcaccatattggccaggctggtctcgaactcctgacctcgtgagccaccgtgcccggccatgtatgtggattatgttctggccagaaaagcccatgtccaggtctcagggtttgtccatggtgtggatgtctagggcccagactggccaccctcagcccagaggaagtgcctgtcttgacctcttgtcttccaccaagtaccctgcgggcagctgactgttccggcccattcccctcaacaacagttgccagattccgtttcctgcttgcatcctctgtttcttaatctgcagcatttgcaaaggtgcagggtctgctttgggaatgtttgggggtggtggtacgcatttcacggtatctgggaatttggttttgtgatggaaggaagaaccattggaccattaactatggttttagagagttactgtctttcttctaagcgttttattcttcactggctctagtcagccttgctttctaaaaaagctcttcaaaacctggcggactggtccattctcctgttccttggccagctgtcatcaccattagctctgttttaatttgcatcttgtaagtttttactgccatctttcaggtcttacttcacttttggggtgggaccccttcgccttgttccagcagttggaactcaggtcttcagcatgttggattaatttcctgtcccacttgggctcaggctcactgtaccaatgaccaatttgttagccggctttgctgcttcctccatcaggagcacacagcaagtgttctgcattttattaatatttcctggtttttccatcatccctgaatccctggctggccccctagtccagtgccaagggccgtccagtggccttcaaccaggctctcatgttcttgggccttcccgcaaatgctccttcccttcccagagcagggagcctgcccctcgctgcctctgtttcccctctcagcaggcggtggttgcatgggtgagtggggcacagatacgaggtcgtggcagccctggcacacggctcgggagcatctggatgtgcctggaatatgcttccatgcaacagagagcagcatctgctcagaattggggagggaagcaatcaccgcatacggggcattttgtctttgcaggaatgcagtgtgagggaagtgggtgattttctttttttctttggttaaaaagtttttattttagaaaaattttaggccaagcatggtggctcgcacccgtaatcctggcactttgggagactgagagcagcctggccaacgtgaaatcctgcctctactaaaaatacaaaattagccgggcgtggcggcagatgcctgtaatcccagcaacttgggaggctgaggcaggagaatcacttgaactccagaagcggaggctgcagtgagctgagatcacaccactgcactccagcctgggcaacagaacgagactccctctcaaaaaatagaaaaaattttagatttacataaaaattgtgatgataatacagatttcatatacctcacacccagttttccgtattaaaattggtaatcattattattattattatcattatcattttttagaaattgagtctcactgtcacccaggctggaatgtagtggccccatcatagctcgctgaagtctgtagtttctggactcaagctatcctgccggctcagcctcccaaagctctgggattacaggcatgagccaccccacctggcctttccctataattaacatcttacattagtacgatacatttgttttttgtttgtttgtttgagacagagtctctctctgtcactcaggctggagtgcagtggcacgatctcggctcactgcaacatctgcctccccagttcaagggattctcctgcctcagcctcccaagtatctgggcctgcaggcacgtgccaccacacctggctaattttttgtatttttagtagagaccgggtttcaccttgttagccagggtggtgtagatctcctgactttgtgatccgcctgcctcggcctcccaaagtgctgggactacaggcctgagccacccgtgcccagccggtatgatgcatttgttacaattaatgacccatatatatatataaaactgctgagctcaagtgattggcccagctaggcctcccaaagtaattgatccattgttatccaaagtctgtagttacttagggtaactttttatctttctatattcacttcttttggggtttgtgtgggggggggaggggggcagggtatggaaaaggaagtaattttacatctttactttctgtcaacttcctgatggtggtggagttggggagtagggaaacaacaaaatactctgtgagaacctccattaaaggggagactctcagcagaaatctccatgtcctgattagatggcacaacaaacagaaatgaccgtgtcctggcttggggatttaatattggaaaacaagcttgtcttaatggaaactttcagccagtaattttgttttcttgtttgtttgagatgaagtctcactctgtcgcccaggctggtgtgcaatggcacgatctcaggctcactacaacctctgcctcctgggttcgtggcagttctcctgcctcagcctcctgagtagctgggattacaggtgtgcaccacaacgcccagctaatttttgtattttcagtagagatggggtttcaccatgttggccaggctggtcttgaactcccaacctcagttgatccacgcacctcggcctcccaaagtgctgggataacgggtgtgagccaccgcacttggccataggcagtatttttgtgtgtttgaaactcatcattgtgggcgtttacaagttggactaattccaatactgattttggaatttaaagctttataaaatcataacgcaatttgtagtgttgtcaatagaaggtcctgatttgtaggagctggctggcaggcagctattaggggaggtggtcactcagccaagacaggcagggaacaggaaacccttggtcctgagaaaggcccctggaagaggccagccccgagactgtttggctagtggtgggggtgggcaccagctctaccccagccctgtgagtgcatcgttcccttctgttcctgtagctgatctccctgccccagcctgcgatgggaggatcagcagtaaaataagttgtctaaggtcgcgtgtcaggatccaaaggagaacccggtgctccagctggctgaggggagagtggggcctcggagacagcaggggcagattcccccagcagggcaaagcaaccctgacctccaagttgcaagggaataggtgactcagggagtacctcctgcagccctgctggtctcaagactcccaccttccagggcctggtcctgtgctcagaaacccctctgcatagggtgctgatgagtcctctgcagctccctcacccaagggaccacactgggaaacccagtagttgtctcggccatggcactaagacctttgcaccctggccatcttgttccgggacagccagcatctgtggtgtggtatagagacaaagctgccacctccaggacacttgctccttcctggccttcctgctgccctgaaacctgtggcctgtgtgttagtggaaacattctcagtttcattgctcagtaaaccttaggttatccaaactgcaaataaaatgttctctactttctagatttttataacttgctattttgagagaaaggggatggggttatgtgtgcaaattaacattttcttttggtttatataactccctgtctacgtagtttgaattctttaatgtagatgaagtttcacactcctgaatttgggaatggtcattgtatggtgttcaccctgtgcctagcagaggctcagtgaacatctgtggtcagaatggacgtgtccttcgcagatcaggatggtcgtggggcagaactctggtgcagctgtgaagcttcccaaaatcctctggagtctgtgggcctgggccgcatggtgaaattggctgtcatcttcctcgctttgctttctggctgcttgttggggctgagttgaggcccatctgactgtctggaggtagtgggtattcatccgttgttgcttggcaccagagggcaggtagatcctgtggcaagtggacaggtgagaggcccaccaaggagaggtgaaattgggggtgcctcctagggtatacatcggacccgccctgggtctgcagcccggtggcttcttgggcagacactgcacttggcggcttcagaggtgagggcacagaatgacgcgggtcagggagtcccaccatgggccctgcccatgggacttgatgcttgggtcagtgtacaggtcagggccttccttgaactaaaggctacgtgcacagactgacagctgacacttgctataacttactgctttgagagaaagagaatgagggttatgcgtgccattaatattttcctttgatttctctcatattttggtttacattatatcctttgcctgggttttgagatggtaagataagaagtttgataaatggcatatataaaagcagttttttcccttctaaatggatatttttaagaacagtttgatttacagaaacgtctagaaggttacatggagagttccgtatctcctcacctagtttccttattatcatttgacattacattagtatgagacatttattaaaattaatgaaccaattatcaatacattaatattaactgaagtctacattgtattctgatgatctgatatcctttttccatcccagaatcctgtccagtttttcaccttgtatgtcactgtctttctccttaggccccacatggcggtggcagtttcacagtctttccttatttttgatgaccttgacagttttgattatgatagtatattttgtggattgtccctctactgcagtttgtgtgatgtttttctcattcctgggctgggttatgggtttcacagaagactttttttgtgtaatctctaaataaaaaaattcttgaaagaaaaaagtgtaagcctttgccggccaataatgaatcgccccacatagcaggtggacgtggggggtgtctggttgtccatcagtaggagtcgcccttcccttatacctgggcctggtggtcaggcggggacttcaggaattcagcagccttgcctgcgttcagctgaccaaagacttttccatggagctgggaagactgcccaggggagataggaagaggcacgtcgcacacactgggcttccctggagacttctggattctcgagttcaccctgaggcatttactgatcgacacatgggctagttccttttttgttacattttaaaattctggtgaggtcgttccatttatggataagaaacccccaggtgtgaagggctcaggtgatgtacccagagtcacacagctcacgagtcagtggcaggactggagattacactgaaggttggtgcactgtgctccctggcttctgtgcaggtgtcaccctcctccaccaggcagactttgagtcgtgcaaacagaaaagatgctgcccacacttcagggccatgcttccagtccccgtgagctacccccagcaggctcctgtacgaaacatgacagcactttctagggtgcttggccgtgcctgcttcccccgttacatctgcgcaccctgcttgccttccgttcctgccctgcactcacctagcatggtgcatgcacctgactgcttagaaggcacgggacgttctgacttgatgttttcccgatttctcgctggtcctgatgttggtagctccatgtgacacaaagcattgagtctctggctctgctggggttaggatttgggatgtggcttggtagaggggtggctgcctgtgcctagccatcgccatgttaacagaagctgtgatgtaggggctcatagctcacatccctcagccaagagccactggtcactcagacgttgtcctgggtgttaggacatcagcctgagcattagagggagttcaccatcaagaagatgacggctttttttttttggctagagtgccatggcacaatcagggctcactgtaacctctgccttctgggctcaagcgatcctcccacctcagccacctgggtagctgggattacaggcgcatgccaccaagccaggctaatttttgtatttttcttaggacagggtttcgccatgttgcccaggctggtctcaagctatcctaggctcaagctatccgcccacctcagcctcccaaagtgttgggattataggtgagagtcaccacacccagccgatgatggcatttttctgatagactggaaagccagctgaatgaaatagctagaagaggacagtgaccctcagcttcttcatatggagcacgaatggatgtaaatttagtgggatttcttttccactggggctggccacaagagctggcagtgtgctcctacagtgagtccctcctctaactttacctcccactttctccctccggcccccttagctctcagctcagagacccacaaaaacaaatcctggggagctgactgcgcaggatgtggacttggtatttccctgatactggcatttgttagccggatcctgcctcttcccttcgccacctcgccttccccaaagcccctgcgggctttgctcttccttccctttattttgctgaagttgacagtcaggtatgagctgcattaaaatgttgactcatccttgggttgttttcaattttttaaaaagtgcacattgagaaaagcacagattcatgtgtgcagcacaggaaatcatcacaaagagaacaaggctcttgttgggggcatttgagttcaagcagagtgccccagttgcaagacttccatttggatctgatgatggctggacctccctggaaagactggaacctgaagagcccagtcaaagaacagtctgtcaagcagcccctccgcaaccacagtttttgtgcagagtggtttggggagcccatggaatggggacagtacgatgtattttctagtggcaaacatttcatcatcaagtgagagtttctttgctgggcatttcctgttctgtgtgaaacagttgtggttacctgtgggtgtgtttcagataatcattagagcatattctctgctcgttaagcagtaaaaccagtgaggtggggaagcttgtgaaactgaaatcccaaatatgcaaaacttggcaagaaagtagagaagagccagaccagctctgagctaagtcaccaaaccagaaaggtttcattctttgtcttttcttcctctgtctttaaccacaagccttgggctgaatccccacatctcactacacagtcagggaagcagggtcaaggctgactggggacactggcgtggcgggaatgggtgaagtctcctgggtggatagtcacctctctgccttttttgaaactaaacttctctgatttttatttcaagttgtcctgaagaacatgattctaaaacagattcagagcacgcactctgactataaatagaacataaggcaaacttggacaatggattgtggcacttttttttcatgtacctgaaattcttagagttggggctctcttcccttgagaagtagaactgctattcttcggagaccgatgggtgacctcagcattgtcctcaccaagaacgctgtttccccagggattgcacccctcccaccacagttatttttctctgaaggcctgagtttggaagaagtacttgcctgttcccgtaattatggaaaccggaaggtaacttacctgtttgtgcctggcctaattcagattagaaaaagatcaatccattgttgtctaatggacaggggacaaatgatgaagaaaacagaaatagcccataaaatgatagggatgtcccggctcccaggcaaactctggtgaaaaccgaggagactatggtgttccctgaggtattcaccatctaactgtcttccacaccatatatataagctgtttataaattctttgtcctggccaaaaatacaaaacctactggcagtgatttatttttttaatgcattttaaataactggattcctatgtggaattggagttggataattaaattacgatggcctctaaagttggggtgcggggggttgagggcttcagcagagagcacccctggaaggtggcactgcagcctgggggtgggggaaaaccgtgcctgatggagttgctgcaggggtccctacacggggtgtccacccttcttgcccagacaccctgtggctttgagaatcgctgtgacatagccacgggagagctgtgtctgcttaatgcttttgtttactttggaagtttgtcctacatgaatgaattcgcaaaacttacattccccgtaaagctgtcactgagagaaaacacagcaataactcaggtgatgtagttaaaccaccattgagtttgcgccatccatgagctgataaatcgtacagcttcatttggtaggaatcagcaattttatgtggcaattaatttttactactgtaggggagccagaggatgagcattttacttcggttttgtgtgtgttgagagaaacttaacggttttgccacagcaagaaaggatcgtgcatgaggcctttcgcacgagtcgacgtgtttgggtgttatcctggggtgtccttgccagcttttgttggttcctcacgtgggcagaagagtgaatgctcagtccccatcggggtgccacaggcctcatgacgtgtggggtaaaacacgtatgtggcttgcggagaaataaattctccgtatttcttaagtatgatgtttttccccaccagaccgattcgcccatgctgtttccacatcagagatgaagatgtgcgcagagtaacacgtaattagctttccagattgcttcgtagaaggataatgtgataattttcccattgttcgtttttggttccaccaatgatggccatttagcacagcacacagttgcggctgaggtccagctcgaggctggccgaggctgtgcacagctgcccagggccctgcctcgctgctggggagctgtcctttctttggctgagctctcttcctgtggaggcccagcctgctcactggaacgccagaaagatcatctgagcatagttgtctgttcagccagcctctcttggggccattaggaaaacgggtgcacagcagatgttgttccttgggtgccctcagtggtttattttttattttattttatttttttgagatagagtctcgctttgttgcccaggcgcccagtggcgcaatctcagctcagtgcaacctccatctcccaggttcaagagattatcctgcctcaaccctcctgagtagctgggattacaggcgtgtgccaccgcacccggctaattttttgtatttttagtagagaggaggtttcatcatgttgaccaggctggtcttaaactgacctcaggtgatccagctgccttggcttcccaaagtgctgggattataggtgtgagctaccgcacccggtccctccgtattttttattactgatggcagcgaccctaaccctaactctaacccctcgcgctgagttctgctgcgtgctgccagcgggtgtctgctgtcccagaacctccccgcagccttcagagttgtccccacgttacagtgttagagctttaaacaggacagacttaaaaaagcagatgtcctcatcaccctcatttcacgtgcgttctcttacagacacaccctactaggccattatacagtaaaccctagcttctattacatcaacaaatagttcagtgtattttcctaaaataaaaggactaacatttgctgagttttgagagcacccctgtgtccccccattcaggggcacctctttctagtagtccagaaccgaggctggactcagtcgtcccctgctcaccccgttttcccctgtaggcaccgttttgagtccgctgggttctgcttctccagccctggtgggagcagtcgctaagggccctctcggtttagcaattgaaacaggaagtgaaacacacaggagtttaggtccatcacaaactcagggcgtggacgatccctgggctacccggcttcggtcccacctccaccccagctgtgtctttggcccgttgttttctaccctgggcctctgtttagtcattttagatgaggaaagcatacctggttcctaagactgttgggaggaatgagtgaattcatgcaaagtgacgggaacagtgtccaggatgccgtgagccggggagcctgcttattgctacagctgctcctctcagtaagggtgtgacagttgcagtgaccgtgaggaggtggcacctcaccgaggtgcatctgagaacccaggaatgcaggccagctcacaggtccaggatgctgcacgggggctccgtctggcctgtggtaccagctctcagttgcctctggcttggtgtgggggcctcaggctttgctgccgtagacgctgttatatcctcccatacccagatcacctggtgtctgagtcccaggccactcctggaactgggatgtgtgggatttggtgtcaaactggctgttccttggagcaaggaggaggagaggtgagggaggtcctgttcctggcgctgcagggcctgtaccccttcctgtccacaggccttctctggccttcccctggggcagctaggggtgtggagcagggcggctgccagtggagccaccgtcaagggaagtgtgggtgtcgccccggatgcccagcgagagctttcccctgaaccagagtgtctggtgccaacagcgccaccagagggggccgttccactggaagtcctatcgggaagtatttttacagcgcttggctgtccttgcagacgaaaataagatgtttgctttagcaatttgcttagccctgaaaacattcctagacaatgccagggccttagttgaaaatagtatgctcagcttgctgggatggtcccaggaaggatgttttgagtgaaaataaaatggtacataccagggctgtttgccaccgcaggaatcctgggagagttcagcattgagggttgccgggagccgggatctagcaggggctggctatgggctgccctagcgtgcacccctggggccgaccggaagattccagaacagggagaactgtctgcaggtgtcaccctgcatgttgctctttcctccctttgcaccttagcacaccagcccccgcgggtcaagaggggtctccagctgcggtccacagtcctggcctcggcttcgtgtcctctaggttggggcaccggcctctctggggaagcctgcccgtgtgcttcttattcctcgactgtgagaaacttctttatccatctgcaatctctcctcttggcttcccctctctcctggtcatggttctgcccacgcagaatacacccaatccctcttccgcatgactgccctgcacataatcacaggcagagatggaaactcgggaacgttccctgctggggatgagcattgccattctcttccacaacacatttgcaagtttttcacttgctcagaaccagtgttgcaggtaagccgcaacagacacacacatgtacacacacacacacacacacacacacacacacacacacgtggggggaatggaatatcatgaccagtagttaaggaaaaatgcatttctgtttaaaagccatgttttaagaaaaagtacttgaactcaaataatgacgagtgacttatttcatgacatttgtctctgagacaaggtggcaaatagtatgctatgatcatttgtcgtgtgaagagtgaagtcagagtaacccgctcagctccagagctttgttttcctctgcggattcccttggcagcatttctgtggaggataaaaatagcacacggtgccttaaaataaatggctgtggggaatgcttgtgtacatcagctgcgtggccacatatgttcacattctccatattgttcactcttcaaaagagtgactgggatagacggttcgaatctgcccgccatatgataactaaagtgacatggaagagcctttggcccccgggaaggatgactccagggatgggcagtggggcaggctcaggtgtgtcagactcgtggctaacccgcgaggtcctgcaggtgagccttttctgtcctttaccccatttcatcctaagtgtctccccacaaaagatcagcaaagccagacccaacacaagctcccaaacaggccccttcctgactcccagtgaatccagacaaacgctgacaagctgacagattccgcctcctggagctggtgggggtgggcgggcaggaaattggcggggcgagaggggcagcacactgagctgcccactgatgcagtgtcagtggccttggagcatggcttctggggtcgacgtcaaaaaacagtgtgaaaatcttagcgtggacattaggctaatgggtccaggtcaggtgtggatcaggatgggttggtggtgacaagccttgggtctggagtaaattccatctaaatcatgtcacttttggctggagtgcagtgatgcaatctctgctcactgcaacctccacctcccaggttcaagccattctaatgcttcagcctcccgagtagctgggattacaggcgtgcaccaccacacccggctaattttttgtattttaagtagagacggggttttgctatgttggccaggttggtgttgaactcctgacctcaagtgacctgcccgcctcagcctcccaaagtgctgggattccaagcgtgaaacaccatgcccggcctcaattcacatttctgaagtgaaattgcgtatgtcttacccctcacgtaccttcatatcgctgattttctcctctataagccaacaaaacccagcaggatcctgaaacaactagcattgcttgtgtctcctttttacttaaacacgcctcccacccccaccgcccacactttgtttagcaccagcaaaggagacaaaagtgacagtgccgtctccagaaggttcacgcagtgagcctccggtatccatgcagaagcctccccctgcccatcctagtggtaaggaaatctcctgaaggtcctcgtcacctgcctgaccgtggggatgtgcttttggtggtggtggaatctccgtgtgaagaatttggtagacttgattctctgatctctctgtgcctttttattttgagacagagtctcaccctgtcgcccaggctggagtgcagtggcataatcttggttcactgcagccaccgcctcccgggttcaaatgattcttctgcctcagcgtcctgagttgtggagattacaggtgtgtgccaccacacctggctaatttttgtatttttagtagagacgggtttcgtcatgttggccgggctagtctcgaactcccggcctcaggtgatctgcccaccgcgccaccacacctgactaatctttgtatttttagtagagttggggttttgccatgttggccaggctggtctcaaactcctgacctcaggtgatctgcccgcctcagcctcccaaagtgctgggattacaggtgtaagccaccgcgcccggccgtggcttcacatttcaacaggggaatagttgcgacacacgcccatgcctcgctgtgtgaacaccgtcctccagatccttggcggttagcttggaaaaggcaaaactcagggggagaggaatggatggttagatcaggtgagagcacctttatgggacggtgcccaggaggcatcttgtgaggacgcagcactgtgtgtgcaatcgtatcacgtgaagaacttttaacatctttctggagttttctggtgcctgtattctttatagtgggtgactttggggagggcgcagctgcatattccaggctggctgggtgcaactgggacctccactttgcctactgcacagtggtcaagttcaggtgacagtccaagagtttctccccgtcagggctcctgtaaaactctgtaacagttcataaagaacaagcagaatactaactccgagaggcctccaagttagaaatgctttagaggagaaggctgaaaaagcacctcccgccacccagctcgttgatggcatgaaagcaccaggcctcattcctgccacggccctgagcctggcttcccgtgagaccctcttgggggcctgtggacaggaagtgggacggccaggacccagacctgtgacctgcgtcagagtgtaacgaagtccaggccagtctgttgcccgaagcactgggatgctttttactgaaggagtgtttaaaaggtaagctggatctcagacaaagctcctccaagaggcttccagaggctggagttttgtcaacaaatgaaacaggccctattttaagccacgctgtgtaccaggacttcctgtttttccagagaaacttcttgttttggtttttgtgatgatggatttattgaaacatttgctattcaagtgaccctctttgtgttccaaggaaaaagtcaagctggagattctgtggcctggaaaagggatacgcactcacagcaaaaacgtcatccccaaaagactcagtcggggggagtctgggcctcagtggccgatcagtgaatggacaaagagctaattgccagtcaggggcccagacggatttcatagctcggggtttggcctgttgtttagagggaggcgggggctggtcacaggacaattgaaaggggtttttgttgttcctctcaggctaagttaagccatgtgtgtgtctctctttcgaggagtgctggtctggccaatcccagccacgtaaatcccactcacttcctgctgaccttttgacaccaacagatgttttttcttacaagtgtcattagggcctctctactcgctgacctcatcagattgtgttgaagtcgttttcatcggttttgtctctaacaatccgtttaacccttcctgggtgcctctctgggaataagattgcactgccttctggccttgctgtctccctcctgcccccaggacctggcatggggaacggagcccaacccagagggcagagaggcatgcttccccggctgggggctgccctgtgtaccccggggacagagggacccttgtgtcttcctcgggaaggtgtgatggagaaagcaatgaggggctcaacaggtccctcggagagaaccttccagagctctgcctgtggatacatgctctgatcacacagctcatcaagcactggggccacagacacggactgggaggtgggtccccatggcacttgtgtgacctgtccgcattgctgcccgtgatggggttgggagcgatggagttggaggtcctaaggccacggaagtttctgtagccaacatccctcgactaagagtgcagactgtcatctgacctgactctgtggccgttctagaggcaggaggatggcgttggtcatttaacctttccatgaagctgaggcacaaagagcagctgtggggctggcgggtgactagagggagtgagttttcagcagatgaccctgactcctgggccgctgtgttgtgatgttatcttacaggctctgggcctcctgggctccttagagccaatggcacactcttctgaaggcatctggggtggagggggagtgtgtgtatcctgcctgcacctgaggtttcggggactcacctgaagcctcatccagagctgacagacatctgtgctgggcgtgtcctcctccatggcgtgcacgccttcactgtgcaaaccagcccagcagaatggaattgctggctgcttatgcattgtgtcagttactactcacagccgcttagaatagttctcatcgcacatggagcattctagaagtggtagctgcttttgtttattagttattattattattattactattattattattattattatttttatttttgagacacaatctcgctgtattgcccaggctggagtgcagtggcgtgatctcggcacactgtaacctctgcctgtcaggctgaagcaattctcctgccttagcctcctgagtagctgggactacaggcacgtgccaccacacctggctagtttttgtatttttagtacacacggggtttcaccatgttggccaggctggtctcgaactcctggactcatgatctgcccacctcggcctcccaaagtgctgggattgcaggtgtgagctgccacgcctggccagttagctgcttttaaagtcatgcatgcagctaaaaagcgttccagcctcttggagcctcctccttcccacagtcccactcctcagagggactcccctgccaacagttgggtatgtgtctacctgcctctttgatttttttcttttcatgattttacatgctagtctggctttttgcttctgcagatgttctgtgtctgctctggagagctctcccttggagtgtggttcggggattgtggggtgtggctttgtgagacgtagccgtgttttgcatctggctggtgtggctcagtctgactccacaagcctctgcagtgctgcttctgggggagcgggagatgtacatcggggtcctaaggacataggactaggagtgacctggccatgttgagtctcaggttctctgaagtttggatttggtgacctctacaatctcagaaggctccagaaatgccgtgatcctaggaaatcatccagggccacccaagcatctgggcacatgagggcatggcacctgcgtggtttttgcagccttcccatttctgccccttgtgttgcagttgaggccagctcctgcctcggctcatggtgttccctgtctcagaagcggctgtgtttgtgccctgaacctctgtgcagactgccttcaatatttacctacatgctctttttctctgagagctcagacttaatcgtagctgcagttcaaggaccacttttaagaaaaagcaagaaggtctgtttacccagtgaattaccattcagaggggggtctaggaggctgcattcttaatgtggggcccaggctctgatagatctttttaatgttccccagatttatgggtgtgcgtgagtcagagtggagaccccagggtgcctgagttaactctgtgcatgttgagcgtagccctggaatttattttaagcatctggggtaagtgaacataacagcagactttccgttccttcagcttgtacgcattgctgttgtgaggagaatagcgtttaccccaagagtttacagaagtggatatatcacagacctcatgtcagtctgggcagcggaggatttagagggtttcgcttgttttttgttagtgttctctgtcctgtaggtagtataaactagacgccatgcattacaaatgtattactgtttttatcttttctgttgaactgtactgtgtcagtgaccatagtcagtgtgatagtttgtgtaaagggttgtattagttatctattgctgtgtgacaaattacctcaaaatgtaaaggcttaaaacaacaaaactttattgtcttgcactgtctatgggacaggaacctgcacagcttagcttggtgcctcctgctagggccctgacaatgttgcattcaggatgtcagtggggttgtggtctcatctgaaggcccggctcggggagggttcagcttctcatggactgttgggactgagggccttggtttcctgttccgtgggtctctccttagggcagctggcatggcagctggcctctgggagggagggaagttggcagggaagatgggaggatgcccacactggtagccacagtctcttttaacctaatctcagaagtgacatcccctcacctgtgtatactgtttactgtttgtttagaagcagagcttgtacaaggacatgaattccaaaaggttgggggtccccgggggccatgggattgattctttttctggcatccacagtgtagatgggatctgccttattcagggagagggtcatgttcagcttggaaagctctcagtgggcctctggggaggggcagtgattcagaaaagcctccatggccctcaattcatggccctctactgttttgtgggcacgcctgtgtcaccggtgggtggctgtgcagagctatccggcttcggattccccagaagtcctgtaggggctggaaaggtcactgagataatgtgtgtgcaacctcagtgagggtccctgtgtggaatctgatcctctgccgggtccctggtttcttgtggagctgggcatgaagggcagtctgtggccagtgccctgcccttcggaactatgtggcatctctccttttccaagtgaagttcccatttcccttcctgtcttcccactcatcagacccgtctacaccttcggctctgggctgagatctcccctcccatcttcaggagcgtgtctgagatgttcaccccggcatcatctgaagtgctgtctctgaagcccagagggtctaacctcagaccttccaaaaaccaaaacctattagcctcaccccttctctgcctctcttgagctgagcctgttgatttcccaagggccttgggagtggagcaggctgagcccaggagccactcatccctgggtgtcctccctgggagaacctctgggaggggcctggagaggacagagggccttccttgcactgctgtgttgggggatgccaggaggggctgcaagaatctggactgcaaaagacctttcactgtgtcctcttgctctctgttcggcgggcagtgaggttgccattcaaaagatagagtggcgggtcattttcagtgggctcctcctgctcccatgtcctttgtgttgacaatgcactggatccttcctggaggtgagggagccccggccctccagagatgaacccccagtcgtactccagaaacctgggagaatgctgcacctgccctgaggggcagccttggcttcggtggccccgtggattcatgcttgaattatcctggaagttgtgtggggttttgttttctttttttttctctctcttcgaataagccttttgtactcctaaagttctgtgttttgaagaaataagtacacttggggtcagcggctgcatgctgcgtgatgcgtattcataaacttcattctgggggaagaatttgagaatggaccggagagaatgctttgacagtcagaaaagtttttctcaaaatttcccatgaacttgggaagtgtggagatgcacgtggctgtcccaaagccatatgaatggagttgatccaagcgcccaattccagcctgagatccagtgggcgctccgtctgggctcccatgggaatgtgttggggctgccgccaagcaggaaccgatggtgcctgtgattgtggaccccagattcctgctggagcccacactatgatacacaaagcccggactgaggcattcaaaggcacaatcaccatccgtttgctgctggaccccaagggcgttcttgataggttcttccctcctctgtgggccgtgtggggatcacctttctttgatctcccaaccctggcatgaggctgatggaatcttctgggtgttgttaacacagacaacacaaaggcaggacggtccaaacaatgaaatcccagacatggagcacagaaaacagcttaagggaaataaggttagaacattccctcctgggtctctcccctggcgaacacaggtctgagcctctcaggaggctgctccctgcgtgttgtgggggtcagctctgggacctgcagcccctctgaccactgctgggaaatggccacgggcacacctcaggccgtgcgtgttgagctgtctggggcgagattggagggtgaaggttgcctctccccataaagcaggcttgggttgacttggagctttttaataaagccaggattctgcacagattgctgcccctgcatcacaaccaggcttcctgccggggggtcctgagcttgcaggtctcagcagcgcagacccccaccgataggtgcgagcctcccgtctgttggcatgtgttggcgtgctcgggttgctgaaagaaggttccacagacaggccaggacagagatgtgttttctcagagttctagaggctggaagtctgagataaggcatccgcaggggtgcttccttccaaggatttgagagaagccctgtctccgtagcttttagatgccatcttcacgtcgtcttccccctgtctgtgtctaagtgtccaactgtcctcctttttatgagaatattcgtcttggattagagtccactctaatgacctgtttaatttgattgccgctgtaacgaccttatcttcaaataaggttccattctgaggtcctggggcttagaactttaacataattaggggggtccataattcaacctgtaacagtcagtgtgtgacctgtgggcatttaattgaaaaggtttcttttttttttttttggttggttggtttctattttgagacagagtctcactctgttgcccaggctagtgtgcagtggcgtgatctcagttcactgcaagctctgtcccctgggttcaagcaattctcctgcctcagcctcctgagtagctgggattacaggtgcccaccaccacacctggctaatttttgtatttttagtagagatggggttttgccatgttggccaggcttgtctcaaactcctgacctcaagtgatccacccaccttggcctcccaaagtgctgggattacaggcgtgagccaccatgcctggcctgaaaaggtattttaattgctttggggacttaattgacatcaagaccataaatgttcaggcttggatgactatggcaggaagtacatgaggagtgggcctccagggacctgcctttccctaagggtctccatgtaccgttttcgaatggtgtctggggtggggacataaacttgggatccaggtatcctgagtcctcggaccttttttcccatttatttgtctggcttgggctctaacatgcacaatatccccataaaatgtctcagagcagatttttaaatggccattaccttgtcaagaattctccagtgggatttcatgtaaaattaggatccctgatggtagctcacgatgagctgtaattctccacataggtgactgtattcatgggcaccatccaccctcctcatccagatgtctccctctccagaggactttggtgcaggaggcctgtgaggaccccagttcattatgacaaggttgcagttctctagaagattctcatcaggagccttgtctactcctccccagcaacctctttccactaacttatattttagctatagcctggaacattctgagctatgatgagtgttaaaatggggtggtgtactcgtcagagacctggagaccgggactggaagccactgtgaaacaggtgaaatgattcaagaagacagctgaaccccagcgacaccccataacagaaacaaaagaactcttgtgagccgcacccccacccttccttttcccggcatttgataggcaaagatgaatttgtgtgacacgggagtgtcccaccctcctcctccccatcagactctgcgagacgcccgctctccctttgggtgcagtcatggataccaaacaaagccttcatccctctgggtttccgttacgtagccgtcttccacgtgaaaaccgtgttaagcaaaatgaatagctgcaagctattttatttcatgttaaataactgtggataagactaagatttttctctttatgactcaggttgaaaagataaggtctgggaagcggtgtctttgaatctagagattttctggagttagggatgtctgatttctacatatcatttccacgacctgtcgcaggagacagggtaccggtgccccatgatgctgcagagcggcttttggtgatagagacgcattatggaatgtgtatacttgtaaggacccaggcatagagtatctgccctcataaagcaaacataatcctccactcctgaggtctgagttggctctcctggatgccagcctttgcatgatgagtgatgccttagttgaaatgaaggatgggccaccccaggtgcctggagcacttttatcccagtgcatgcccaaactactggtgtcctaaacagttggccccacagacgtggggtttggggagctgagctgtgcactggggcggtggctacactggcctggtcacgtcaggctgggcagaagagttggagcggggtggctcaagagtcttgatttggtttgactctataacttggctggcatggaacttggaaggctgggtccccactccttcagcaggtgggcccctttggagggagccgttcctgcttgtttttgagataatctctccggacacttggcagcccagccagcgtttgctttgatagcttatctctgcccgtccagcttgaactcccctttcccaccatcttcgaccatgcctgcgggtctccacctctccctggccaccatgtagccctcattccttgctgaaggttccacactgaagtgggttgtacagaggaacctcgtcctggaaagtgaaagcaagtcccactgaatgtgacttggagcaagcttgtgaggtattcgtggcatcagagccatgaagagaaggtggagaggcgctgcctgggggaggtggcaccggagctcaggtgggggctccccaggatccgcacgtgtgtggggtctatccaaaggcatcctctgccaaatcaggccaagcatgtgctgtatcactcagtggtatcctgctgctgtgacaactgtggcgactttgaaatgatggtaagaaagagtgtcctgtgacggtggggactgaattaggcacatctgtctcccgtagtggggcattagtgggctacaccagcccctcccattcttctccaaccagaaactgtcaggtaccctgccagtgtggagaagaggtggccagcatcttagaacttggtgaaaggggtgttgtgtgtgtatgtgtgtggtcaggtggacgtgtgtgtgtgtgtgtgtgtgtgtgtgtgtgtgtgtgtgtgtgtgtctgtggtcaggcgggcaaattgaggccagagagcacattaatgtgcattctggccagaatcaattcctggggaaagttggaaaaatctcctttcctttctaaattagtgtctaccaggaaaaaaagttgtatatcttaagatcatacttgtctcacagcaaactgatcctggtgttgagtcaaattgagcctgttgatcaggtgtgcatagtgctccagaggctgtcatttgtaatggaaagcctaaggggcatttgcggagcagcccagccggcccctccccagcaccgtcctctctgtgtgtgttccgtctctgccaagttgtttccaattttcaacactaactggttgctgtcagcagacgtaatggaaaaatcatttgtcagggtggcccctggctccctggggtcggggactccacaccctgggcagggagcctccctccttcttggcctgtacctccagtcactccgctgtgaaagtgggacccccagctagcgtctcgggagataaacaagtaggcgctggcgctgcatcccctttcccctggcatatcatgctcctagaaacgaagcatctgctgctggaacggtgagaccttctgcctctttcacatctggaactttcggggaaatgcagcatctcatccatgggcccaggccttcccttctaggagtagctgatcttattttctccaggtgcttgtagagcttaagttgggatagaaatgaggatggtggctcatggctgtctctgcagcctctggaaggccatgcagggtgtgcagtgccctctgctggccaaagggccccatcgctggacaccaggcctcccttgggctgggccagctcccaggaagggctgcaacaggaaaaggtcagcccacgtgggggtttccattggttttgagagcaagcagagactgcagagagcatgtccttatacaagcattctggaccctacggtgtcaagagatgagtgggctgggatctcagaaggccagttgggttcccctaaggacagtagaggccccataaaatcagtcgaggattccaggcctctctgaggcaaaattcaaaggcaaacatcttaaaaatctaacctgaagattttttttacaaattcatatctcatcattgcaatttgtttgataagtagctaattcctataattgcctttatttgatatttaaatacaagggcaattcatgtgttaagtgtaagctaaataattaaaagttaggaggattaaatcttcccccatttcatatattaagacagcaatgtttaacattatctcattaataatttattatatactatatgatacatataacacagtgttctataatatggttacaattgacagttgaatacatagtctaataaattgtattaagttttgcataggtttagcatataacctccagatatttctctccaagaagtgtagcttggtggctcttgcctttgcaagtcctcaagttcaaaacccttagtggccatcagtcccctgtgcttttacaccatgctggacacagcagatgtattgtgtgtgcccaattgtattgtgtgtgcccagtttctctgcatgacgttcagatataaacattctggaatcatttcttgcacactgtatgtaacaaaagatgagttttctggtggaaccacttctgtctgcctaaaatttgagatcactaattttttttatctgttcaaccagtcttctcggctacagatcaaaattttcatgccagagtaggaaagagaaaactagaaaaggaaaaattgatctgcattcctgattcctcaagtctaaacagacaggaataagaggtgtcatttagtttgtttgcttatttgcttttatccctttttttttgcttaacctttattattaaataacactattaaaactaatatacagtttatttttaaggcatatttggaagacaagttcttttaaactgtgtgaaaatcctaaacacaagaatggctcattttctttagcaacaaagaccaacacttaatttccattatgacacaaatcaaacaaccaattaggaaaatcacaaattctttctgctcaagtcttctgttcttgattatagcttttagcaagtgaaaatatttagaattttggagtcttgcatttaacacgaggaaatgtattttcgtgtgctaacaacccttaaccaaaacgggaggatttactcagctttgttggccaagggaaagcctggtttttagatttgctcacctccttctgtgtggcagcccagagcctcatagtgtgccctctcctagcactgactccatgtgctcagagacttgctgtgtacatttctttgatgtttcttactctgtgtaacttacaggggcttcacttttaattttttggtcatttcaaagcccctaagaatgttttggtgggagttagatggacagaacagaatcacagatccacattccttagcctcatatccaaattcttttttttttttttttttgagatagagtctcactctgtcactcaggctggagtgcagtggcgggatctcagctgactacaacctacacttcctgggttcaagcgattctcatgcctcagcctccccagtagctgggattacaggcgtgcaccaccatgcctggctaattttttgtatttttagtagagatggggtttcaccatgttggccaggctggtctcgaacttctgacctcatgtgatccaccctccttggcctcccagtgtgctaggattacaggtatgagccactacgcctggccctcatatccaaattctaaaatactctgatagcggcagaatttgacctgccctaaattgttgagtctattttttatattctttcttaatgcagttgggtcagtatgattatctgttctggcacaggcatttagatgatttggggggtacaccgtaatagattgtggaagccatgtattttttttttaaacccaagcacttgtgaattctgtagcatacctagccttggggtgtgggaagtggattgtagccctgtgttggctacagctgggtttcctgcattgcatcagccctagggaattagagggtggggcccttggaactgatcgagggcatgtgaccagggtgtgaccatgtcactctggggttgggctgctgggtgctccctggggaaatatgagctccctagcctttctttgatggtggaaccagagtgaaacttcaatgtgtatattagaaagggtcacgactgggcttggtggctcacgcctgtaatcccagcactttgggaggccgaggggtcaggacacctgaagtcaggagtttgagaccagcctggccaacgtggtgaaaccctgtgtctactaaaaatacaaaaatttgctgggcttggtggcttgtgcccagctacttgggaggctacagcaggagaatcacttgaactcgagaagtggaggttgcagtcagctgagattccctgggcaacaaagtgagaatctgtctccaaaaaagaaagaaagggtcctgctagttacctttagggcatggtatgggggcccttggagagggagattttcctgtacgcctctttattggtagtgtataggaagtcagacaccctcttaattcccaaaaacataaaactaaatttgcaaaaattaataaataatcaggaagcaatattcacttttggccattgtcttagttcgggctgctgtaagaaaaataccatcgactgagtggctttatttctcacagctctggagcctaggaaatgtaaaactaatgatctggcagatccaggatctgggagggcctgcttgctggctgtagacctcctggctgtatcctcgcgtggggcagcaagatcatctattgggtactacggactgggtaataatcctgttcctgagggcagagcctcatgaatcacctccagaggcccagcacccagatacaatcactgtgggcattagggtttgcacattcacgaatccagcattcagcatggaagaattttagggtacacaagcattcggtccatagctgccgttctgaaaattggctccattaagctcatttcctatcctgattttctcaaaaagcttcatttccttcctttaaagtacagttttagtaattttgttattaattgtggtgttgcggttgccatttaatcaaaggctgggccagtgctttttgacccactgatccctgactcctttaggacgtttattttgttatatctggctttgctgttgctttaagtttgagacaggctctcactgggtggcccaggctggagtgcagtggctttattcacaggtgcgatcgtggcacatcacagcctcaagagagctgcccgtctcagccttctgaggagggagactagaggcacacgccactgtgccctgcttatatctggtttttagtagttttttccaagtgtagtttacaaaataaaatgctcatcacccgttcagaagattctacccagctctcttcctaagaaagacatctgttgcacaagtttggcttctgaagcctatggaatgtgctcttttgaggtggcctgagcacatgtggctgttaactccggatgaaaagtcagagtgttttctgggcagaagtcattggtgggctggcgttctcaaggccctgttaactggcaccgtatctgcagatgtgccgccagcaccacaccagcaggatcctcggctatgtgtgcaagagctgggtgtcaccaccgcctggactgttgctgtctcctcatcttggcacagtggtcgcacaggctcctggatgagcctgtgggtgcactgagaggccctgtaggctgcggtgaaggaagctttccaggagtgagtcctgtcgtttgggatcccaggctcagaagggtggtggaccttgtgcattgatgcggccatctgggttgcagggaatcttttcttcctgcattggatcgcctcaacctctcaaacagaaagtctgcgccccactcatgcttaacagtgagatctgagttctccggggacacactcagagaactttggcaggacttgcttaactacgatgatattaatttgtgagcatattgtgaaactcggtctgcctttattaacagaatgtttaaatagatttccttgaaagaattgaaagccatcatcatgtttaactggatttgagagaaatttcattttgaagaaaggcactgtcaaaggcatgcacttactctataaatcccttcagctgcctattcttgatgaaggctaggaagtggagtcaagaaatcgagagggtcggccgggcacggttgcttacacctataatcccagcactttgggaggctgaggcagacagatcacgaggtcaggagatcgagaccatcctggctaacacggtgaaacccagtctctactaaaagtacaaaaagtagccgggcgtggtggcggcacttgtagtcccagctactcgggaggctgtgagggaggagaatggcgtgaacctgggaggcggagcttgcagtgagcccagattgcgcccctgcactccagcctgggcgacagagcaagactccttctcaaaaaagaaaaagaaatagaaaaagaaaagaaatcgagagggtctataaaactgagttgatcccaggtttttgtgctgtgtaaccttaagggcgcttggtagagaacctcatgatggtggcgaggagctggtgatggtcattgagtaaaattaacctgcccagattttagactgtgcttgatgaggggaaccctcccctttcccctgcccttgattctggatatgttggagtttgatagccaagcaagggtttgtaaaatgtgccgtttttcctttttgttctctcacgtcttcaaaaatgtcacattctctgtgatacctccacggaacaaatcttccatacccgtcccctctggaaacaaccaagtatctacaagtggctttcttttccaagccttgttcatcttcagaaatgagttgaatttcttggcaccaaatatttcagccctagatcacagccctcacttaaagcaaataaaatttaaggtccacgtttctgatctttggttggagtttggcctgtgatacccgtaactttccttttgggaggaggtagtgtttcttgtgcggtttggcttcagggcactcttcttccttttgaaaagatacagctttcctgttgaccttgaccttcactgaggtttacctcccagcctcagccagaagggaatgattattcgctgcggggatgagtgtgcaagggggtgtcaaaggaaaggcaggagcagctcacagagacctgcaggctcccaccgagtgtttttgtgcatatcctcactggctggtcctcactgccactctgggacatcacagtgacatcccattctacagacaaggagcctgagtctccagaacagctcatccaagctcattccacgagtggggtctagaactccctccacccacgattccgcccctggcatgatttgaggaacaatttcagcagaagtggaatagtgaaacacgttccctctgcttttgttccttccttatttgtgcccgtattgtttggtgtttaggggggaaaaattgatttatgagtggagcctggttttcatagcaggcatcaccaagagagctgtgatgtcagggagcccagagccagcgtggatcgggggtgctggcttgctcagcatggagaccagctggaggccgctgtgtgcagctcagctctaaggagggcctgtggctgtcattggaagatggttatgttaattaagtcctcgtaaatagcttgctccttgggagggctaaggaggaaaatgtcacatttcatacattctttttgcacaagagatatcgggggagaggattgaggctacacaagtcaatggtcactgcccagaccagacccagaggctggtggccttgggagccaagatggccagccctaaacatgggtcggtgccactggcctggggtgtgcagaaaggaacccacagaaggtccagaacagagtgacccccctcccccacccccacccccaaaaaagccagacatgggagtcagcctctttttttttttttaatagtggaatattggcgtttgtggaagctgatggctgatctttcctttgattgcatgattgagattctacttatcaatttttcaggaagccatctaattatacaaattaaaattcaaaggaaagcaaaaggaatgattacgcctcactcgggggttgggggaggagggtgtgaaaccccccttgcctcagattataatgctgtcatttttcatctccgaggtcttcacaaaaattaactgattaattctcttccccccttggatgacgcagctgatgtggaaatctgtttttacaacagagtcaaggaggggccagactgcagtttgaccatcagagcttgcgcctgagcaaatgacaattgctggcccgagcctccctggtcagcctcacctagagtcacttgtgggtggggggggggggggtggggatggacaaaagctcagatcaataggtttggccccccgcccccactccaataactcttaagttggctatagttagggactctttttttgtgtggttacctttcagaaagcccagcactggctaggcgcagtggctcacacctgtaatcccagcactttgggaggctgaggtgggtggatcacttgagttcaggagttcgagaccagtctgggcaacatggtgtgaaaccccatctcttcaaaaaatacaaaaattagccaggcatgttggcacatgcctgtagtaccacctattaaggaggtgaggtgggaggattgcttgagcctgggaggttgaggctgcagtgagccatgagcttgcccctgcattccagcctgagtgaagaacagaccctgtctcaccaaaaataaaaaagccaacactagcaaaaccaatttttaaaatacgtccacatggatctgctcaagggtaaccccacacattctatgacaacctccatctcctgactgatccgatatggtcagtccccgttttgggggaacttcccaatcgttgaaagggtttggtatctcagggatgttacattaattatttatgtgattggaaattgtgctttttcgtagctcttttatggagaatcacgtaattatcgccataaatctttcggatgccttttcagcttcgttgctgggaaattagccgttaacttacagaaacctggtagacctgcagtctgaccttttgataaagtaactcttaatgttttgcataactgatgaccgtacatcattatcctcatttctaccccttgggcctcatttttatctttatctctcctctttctttctgctagatcactgagaaccactttttctgtgtgtgtgtgtgtgtgtgtgtgtgtatgtggttgtggtggtggtcttaaaataagactgatttaattgtattccttgggaaaaaaaaaatacagaagacaatagagtgggccttaaatgttgtttcccagttgagattcaagccacctttttttttttttttttttttttaaagacagagtcttgctctgtcaccaggttggagtgcagtggtacaacctcagctcactgcaacctccacctcccagattcacgtgattcttttgcctcagcctcccaagtagctgggattacaggtgcctgccagcatacccggctaatttttgtatttttagtagagacgggattttaccatgttggccaggctggtctcgaactcctgacctcaggtgatctgcccgcctcggcctcccaaacttctgggcttacaggcatgagccaccgtgcctggccaagattcattaagcctcctttaatcaatgtaaagaatgcagttccagagcagtgacttaaaagctgggatattggggacagctgttaatgatctggacctcaccgggcacattggtgacagtcagaggcttccaaagtgctcagatcctcctgagaaggaggatgggcagcagctcctcttccccaggccgcagtcaggtctccctctagagaatcccacataccccaaaccacatgggagacctttcttgcctcctccatcagcctcacctctacctgaaacgtcatggggatggttacactctcacactaagaaatacttcagcccatatagctggaaccaagtgtcaaggccagcagcctgggaccctgcccttgctggtgctgactgcggtcccctccagctgcaaggaaggttcaggaaggcggcatcggaggaacgttggttaggagctgctggggcttcccacccgcgttctcacgtggtagagtcagggttttgtgttgtgctgagctgtggctttgacccctgacccctgcgcggctgttttggaaagcattgttgtaactcacctggcagcaggccttcgcagagcccctcgagtcgccacggtgtgcgtctgcatctcagtgtgagtgcgtttggggcaggtccaactggctgtcacttggtctctgccactggaatataatttattacacttcaaattggtcagtaaattggaatttatagccctaaagttaaaagcaagagatctgttggaatttgctgcttccagaaataactgacgattgtcttgtgtgcattcacttgctttctattatgagataagaagcaggaggcggctgagatgcacttggtgcagcctccattcccagtgctttgggaaaagagcaagtcccatgtgtccgcatggcaggttcccttatagaaagtagcagttaagtccccagtgagctgttgtcctgtgcccagagggtctccagagagtaaggattcttttctccttgtttcagggttcatagtggcgtcatgcacgcagactcctgcaagttcccctaagttcttagaggactgctttgccttttgatctgagagttgcaaagttccataaagaatggcccttgtggataagcacaaagtcaagagacagcgattggacagaatttgtgaaggtaagagcgtgtttggcggtttttaccaaacatacgtagtccctcactcaaatcttcgctggctgctcccttgagttggctgtgccactccccaagccagagtccctcctccgattccaacactgcataccattggcaccctctgctgggtgtccttggccgtgggcctggccttggcttaggacaaggcctggcttctggggcggggttggggactaggaggacagtttcagggctggtgggccctgaggtctatgtcttccatgtacctaaggttattttgcatataaaagatggtgttgattaggaccatcttttttcacttcctgaaatctcaggactttacctgttttggattaagatatttacaatgctgaattccctgatactatgagattcctgaagagcccagcattgcccctcgtggtgtgttcatgtccctggtatctttggaaatgtctggaagtgttctgttcatgaaaggaaaaataaacataattaaaatctaatggaaacctggggacaaaactctgaagtgttgattaagcactgcgctcttccagctagcgggtggtaagaaaccagcgtgtgggttcgggtttaggggtgagtgcacctgccagatggggtcagtgctacagggctgctctttgctcagggtgattgctggtactgccctacagggtggctctcggagggaagcgaagatggctccgcagccccctctgcacccttcacgcacacgctgaagtttagtagctgacccaccagtttgtggacaggaatatgcaacccacagggcttcccctgcagctgcccatatggaattgtctgtcctataagtagatgtggctcatgccacacggggtggggacatcatagacattctgctgagtgactccatggcctcacagaactctgcgctgcaagaacacaaaagcactgacattcctggggttcagtataaggagtttggcgttaaagggtttttttaaagtaaacattcacaaattataaaaacctacagagaggttggtaggatggtacagtgaacaccaatattccattcagttttccagattcttttgaggggagataaagatagagatatacatataaatagacactgtgtgagtagatgatggattttcttccagaaccatctgaaaaaattcaggggcagcactttactctggactacctatggcatggcaccttttatccaatttcgtactgctcccagtaccggaatgaaccccaggaatctaacctcagggacagtattgtctagtataggctgcatattcgcatttcctccacgtctctttgcctgtgcaatagataagggtcacgcattgtgtttagttgttacatctctctagtctccttagtctaaaattatcccctgggcttttttgactttcagagacattggacttactgaagagcccaggccccattgatttgtagactattccacagtataggttcaccagattgtatggggagttgtaaaatttactcttgacttccactgtaaaggtgcttgattgaggttactgagtacttgcttctggaacacgctcgtgactcagctttccaaggttactagcaggaatgcctctggggctgactccaccccctgcacccaggattctccagggatgttgcatcagaaactagaatgggattgaagagctagcagcgtttcctctgtgtgtttccatggctgtataaacctgacttgggcaaaaccattgtctgcttgcagaccctctgtcccatccagacaggtgctgaaggatggttcaccaaccttcccacccccttcatgtgtaataggaaattttcagccaattttttataacagaagtttgcattaccttgtctatgcatggtgttccagatacatttgcagttatatattttaaatttctcaataactatcaacgcagacaggccaaaatgcagttactccagtgtgggtcaccatctatatgtcagctccctaggcatctcattaagtactcacagttggtcccaagtgctttgttggtgctcctcctatgtataagctgacttagtccttgtggcacctgttatgggtcaggacaggtggcacccatctcacaggtgctgccagagaggcgttgagcagtaggcagtttgcacccaggaacccgggcagtctgtttttttctgtttggccttctctcataccagcttgttggattcagctctttcttccacctgaaggccttgaacatctaacacacacaaacacacacacacacacacacacacacacacacacacacacacacacaccccctctagctttgaattctcaccatgtttctattctatcaactacttgtagaatgttctgtattgatatgcagagagcctgtcaaactgtttttttctccctccccactgcctacacctgacacagggacttctgcgtcccttaggtttgttttttttttctttctaaatgattaaaagcatgaagctgccatgttctgctgtgcttacccggtctgctcccaggcttgtaggaactttgtcttcctgctcttggtgtctggatacaccagctccttaaaattcgtcccctcccgcctgctacacaatgccaacatcaagccctggtcgtgggtccctaggctggaatcaggcaggcctctccagggtcccactccaggtactccgctggaatctgagcatcacccctgcacagatacttgtacaacctttccctgttttctaaggcctgtccagccccttcctctttgaaacttttcaaagcaagaaaaagtggcatggagcttgatccttctgtgtgcccagaatctgccgtggggattcactccgccaggctgtgtctctactcggagagcaggacacagacagtctttgggactccagccaaatgagctggaataatggtctttctagccaatgtaaaagccacattttaatttttttaatgtaactctttgagtttgctatttataattgttccttttttttctgatgcctgctatcaagcaatcctataataccatgtaagaattattacgaaggagccctctcgtaacacaggctgatcagaacaagattgtggtctcctcattctcaagtataatggagatcttcctatctgtttagtctgctgacataattgacattgtgaactgcaccagctggagggttttagtacctactttatcgcattatgccagagctcctttggtttgccccaaacatctattggttggaaatgagggctagctaacaatcactcagcattgcaaagggaacccagaagagcatcttgcagagccctgggtttgtagaacttaataaaccacaatggctgttgttggtggtaactttttgttagagctgcttcttgtggattatgatagaatcagtctgtaaacactgctcccctttcctgcggctgttgcgattgcaacttgaaaaaagtatgtgtttcgttttactgcgttttgttcgaatgtgttagagacgtggaaaatggtcccccgaggatggtatcagctgagttgtgagtagtccccttgtaacatgactcagggagggtgcttctccatttcctctgcaaaaataaaagggacctcctcttaaataaacaagctcatgaaacattccgcacctctggaatgttctcacgaccacagaggataaaaggaatgagaacgttgagctggttgggtggatatgaggaaaaaggagacaagctggtttctgtgaaacacatagatagttagaaagtctgggaatctcattctgcatcacctttgtcgcaggaggatgagaagtctgagaagatgctgccggggatgaggtggaagggagtttccccagtgggtctcttctgtgtcgcgggctcttctgctcttctcagtgggttgaacttgccatggtggaagcacatgtcagtgggatgtacccccaagaaaggtcatccatacgtataaggaacaaagacaggcgcctccagggtcagcaaggttacccaagtggtctagaagtccctctggctctttccttcttccagcagcctccttgcctggcaaacacccatcagagcctccaggatgagagagtgactttctctttccccgaggaaagaacataatccacagagtgttgacaaatggttttgtttggtatttaagatttatttgtttttgttctgagtagctgttttcttttcacctatctttgtacagatgcattataaaatcaggacttgttttgtttttgtttgtttttttaaagcactttgagcgcttcgtaaagaaacagagttgaagcctgcctataggtagtccacaaacagttctaataaataactttaaatagccccaaaatgtggattttaaaaatgggattcataatgttgctatacattataattatatgttgggatcaggcaattatgcacatttccagcaattatgtgattagctgtaattacattagctatgtaaatatacaatagtcaactagacatgccttaaaaccccaaagcacaaatgaacatacccaaacaatcttatgcaaaggtaaaggttcaggaaacagccaaggcaaagcttcacagacaaaagtgcggttctttgcaaggggtaaagtttcatgttttgccttatctgtccccggctttaagagaaactcagagtgggggacccctccccagggaacccctcaccccacctgttcctccaccgactctggggatggggttcatagactgccctcccgttctgcagctgtgaatcaggttcggtgttttatttctctgttgttactcatttctcaagcacaaacataagcgtctctttgcaccggtcagtttggtgatgggcggatgtcttcatactcaccacttttttctaatagcaacatgttaaggccactttgcttttatttggggggccagggatgtgtagtgcaactggagtctgtggctggggtttgggggttcatcaccgtcttctagtttggttctgcagctgcggttttcagctcctgcccctaccacagtgaatcgcgctgtttcccaccgcctggttggtggtgccctgtctccatcgatgattgagttgaaacctcccacagtgtggcccggagcccctgggcccagctgcccagggctttactctcagtgcctgtcctcttggtcccggcacctttgggaaaagagcatctctagtttcaggccaagtcagtgccttgaggggagcagtgcttggggtgggcagggggaaggagtgccgcggggggaacagtgcatccgtagtctccgtgtttggaggaggccccagggtagccagacagcagcagacagcagcccgcacgaatgcggagaaccttctgcgcgcttcacacagctcaacctaattgacaggtatttggggtgactgtgaaccagaaccccaagatacattttgctgccggcttcttgccctctctccttttccagaacgtacagtgttaaagctgtgaaatgagactcctctctgattggtttctaccacttggctcgcttgctactaaagctcaggcaccttggcgtgcgcgctcgagggcgttcctctgtctctgtctcatctccatctacagagtgacctcacgtgcctttctcagcccttccacatccagcaggagcctggctgagcaccccagctgggctgtgaagatgccgagaggggagagcattctgggtgtccagcgctggggcacagtgggatcccacactccctgtccctccagcctgtttctcatcacctgagggttttgttttccgtgttccggttgaagagatgtctgtgccaggagggttcctcccttcccatttgcaacctgggatgggtgacgcagatttatccgagacttgggagtgaggctgagagtcagttctttcgtatcctaagaaaggctgaccgtcccatcaaggcccgtgtgctgaaactgtccgtgtgcaggctcaggtggagcaggtctctgtcaggcagccatttgtatttgggcggtgggtgctttgcctagcttagtgcctaccatgcccaggcttgcaaatggggctgtttgggctttgatgtgggctcaggctcagagggctgaagtggttgtggggaggggcttctggggactgtgtccatgtctctgtcgtttttccccatcacaccgtacactcccttgaggccagccgtccatcaccattgagtcatagtcgacagtttgatttacagcccgggtgtcaaacaaaatgaaaagcacgtgatgaatggagggagcacgtgctgtggagggaggggtgcgctccgctccgcaggtcaggggctaagcggccatgccttggcctgtctctacaggcacatgcatgccctggactatttttggggtgcctttctcatcttgaggagtggcaggttttttggactaaggacaaagtgacagaattggactgagaaaggttcatgggggagggctcgctgagccagccctgattaggagcattgctcacaaaaccagaggaaggacggcatcctgggaccttctgatcgcaggacagccgaggagacctcaaacagtggagtgtgatggggcgggtcaccatggaggtgaggtggagactttgggaatctgcaggaaaagctgctaaagagcagaaggggtggtgttcattgagcacctactgtgcggagcgtcttgtgccgggtgctgtccagagctgagcacagcctcttgaggttgagtgtgttccattgctagaaatgggaatcctgacatggtccaaggtgaggcctgtcctgcatcccagctggggtcccgttgcacactttggctccaccaacactttcaaaatgggcagtgcaagagaatgggcttgtttttttttttcttttgaaaccccataatgagtggtctaattttcataatgcagttcccaggaagctttacaatatagttaagaaattgagtcagaagcaatgtgcaggcctttgttttcacttaccatggctaaatactgagagacatgaggactggggcttcttaggatgcagctaatctgaaaaaggctgggttggttcagacactcgacgtcactctcctgacttcctttggcgcgttgcgtgggtgcccaagcctccgcgctccaggcccagaaattggtgagagcactcagtgtgcaagcaagggtgcacggtgcactcagcccctttgatacctgaaacgatgtctgggcagttttgctaattgttgctgtgtgcttgcgtgatttagacgaaggctgctttaaaacccagccagactttgtgtttgctatgtaaccagtgcatttggtgtggcctcccaccctttgcgttagattagccaacttggctactttgggttgaggacgttcgggggcagggggtagggggttgatgagaggaaagactttttttttttttttttttttttttgaaatggagtcttgctctgttgcccaggctggaatgcaatggttctgtctcggctcactgcaacctgcacctcccgggttcacgccattctcctgcctcagcctcccgagtagctgggattacaggcacccgccaccacgcccggctaatttttgtatttttagtagagacagggtttcgccatgttggccaggatggtctccatctcctgacatcaggtgatccgccccactcagtctcccaaagtgctgggattacaggcatgagccacggcacccggcccaagaaaacttttttaatggcacaaattccacaacacttaacttgacagaagcagacaaaaatccagcacaggctgtccacatttaaaagcaggaaatgggtatgccataggccgatttttctgccctgtgtctgccagaaaaccgtgttacccgctaacttctgcagcctccctagggaagcgctcgctgtgggagacgtagagggcactgtggtggctccgtcctgggatgcagcaggcgctgaagagcctcctgagatgttatttccgctatcaccttcagagctgccctggccctttgtgttggtggaggcaggatcagggaatggaagcccaggcaggtgcaggacccccctggggaagctgttccttaagttccttcagttgggaacttaagttgcctcctgagaatgagctattccctgagaaggccttgagacaaacctggcagcccaccaagtgggcgggtgacaacacagttaagagggacacaccattgagccaaatggccctcatgttactgcaaccttcagactcactgatcccacctgttcttctttttctataaaagtgagaattagaccccagagtcatgttttctctctcatttcaagcagtttcctgcatgattattccaatgggaacatgaaatgcttgttggcagtttgtccaaagactgctccgtcggagggtacccactgatcatccccatcctggcctctcttcccagctcttctggaactgtctggatccatctctggaattgtctggatctctgtaggtctctgttgttaattgacaccttgtgtcgcacagggacttcagaattggctttgggtggacatcgcctctctccccgacacagctatgttacacaatcatcttatttttacttgacataatttctatagtgagggttttggcagaattaaaaaattaagcccgtgagatgtattactctaatgggtcccatctcacttttagtcaacatgagaatttttaagaaaagcagtcctttctaaaagactggagtgtggtgtgtgtgtgtgtgtgtgtgtggtgtttgtgtaaccagagtgtttggaaaagtgagtccagttacaggtgtttttacctagcgcaggaaaacatctgtcataatatttgtcaaatctcagagccaaggctgtgcgagtttgggtggtttccaagcagaacaggttgaaagttgatagaaatggaagctgggcctcctggttcaatgggaggctgatgctgccccaaagcgcatctgcccacatctgccctgctcctgcgatcaccccttggacaccagctcagtaacctctctgaagaatcattactggtttcttaggcgctaccgggtaaacattcttctatagagccctgtttacatttgagaacttgctgagctgaaaaccagatagcaaagaagctggtgagtcaacagagctacctcaccctgctacaaaaaagacttggcatgggggattttcccggaatgctccaagtttatccacccatctttgaggggtgtgcatgcaccatgagtggggtagcatagtactaacaccacataaggtcatgttgttcattacaacaaggggaggaaagaaattggcaaggtggcttaatcctgaggcgctggccaggcgcagtggctcatgcctgtaatcccagcaccttgggaggctgaggtgggtggatcacctgaggtcaggagtttgagaccagtctggccaacatggtgaagtagatagagtagagacatggtaggctctactaaaaatataaaaattagctgggtgtggtggtgcacacctgtaatcccagctacttgtgaggctgaggcaggagaattgcttgaacccaggaggcggagactgcagtgagccgagatcgcgccattgcactccagcctgagaaacgagcaaaactcggtctcaaaaaaaaaaaaaaactgtgtctcaaaaaaaaaaaatttaaagactggtatttctctttagaagattctagtagagtgctagattgagagagatgtgagtgaggaacagcactcgggtttaatgcttgcaggtatgcatgttgtctcattttaaagtgctttcaatgtatacagcctttgtagcttcctaatcaccggcttttatttttgctatgaattctttgtcatgggaatcctgcagttgcagggcaggaacctaccgtgttagtctgggatgttgcttctctggtactgttccatatgtttaaggaaatgtcttaatacttcggggcactcctttatctaaataactgctgttctttgcattattgcgcctgaagtcctttgtggactctgaaagcttaatccatgtgaatatggaaaagcatctgcaggatctaagcctgctggaattaggcttttcatcctgacatacctaaaggaagatgagatattcagatgcagccgcttcccagttctgctttgcagtgtaaggtttagtcacccatcctcctgttcctgtgacctctgttgcagtcactttaaatcccagattacacacgcccttccctggcactccccggccccccggcagcatgagcccatctgtgtttcacagtaataaggtaaagaatgcatttgggcttgagctcggaaacctgtttgattcacaaccaaagagtcgtctcaaagccagatctcagtattatcaaagcatcaggtttcagagctggcccttttttgggctaggcatccatggcctaggatcacgtgtggacctttttctgtttatccatgtttaatttgtgtttagctgtgccatggattaacgtttcatcacggtggattaagagtggactgacattgaagcagccttattttgcttctgttacctctcaggaatcagtggcaggggtgggaacagccccttccagagggggaggcagggttcatcctaaaagtaccctggtgcttggaagagggagtataaacctgagcgtcagtgtggaagtaaatcccagttgcagcttgggagggctggatagagcaagccaccggcttcatcagtctaacgagatgtcacatggaacaaagctttagggttttatttagctcctaatccgcatgctgagagagccctggtccatgtgagcacaccagccaggaagggggacctggcaggctggggacagcctcctctccgggactgagctgtaaggaacagacctctctggctatcgttggggagtgaggcaaagttaccgtgagtcttatgttttgtctgctaaggtttcggaggattaataattcaggccatgctttgaaacagaaaacccccagttggttgtccctgccgtctcggaagggttagcacacagccaggtctgtttttgatgtatgtaattgaagatttataaagaaaagcttctcctctgcctcatccgcagtcattttttttccaatgccagttcccagcaggcatataaatattggtcgttctcagagctgggatgctgctgggtggtacgagggcccctgggagaacgccgagtccctgcggcctctggggaggagaagctccctgacgtatggcacagcagaggggacttggtttgagccaaaccaccgaccacaggacgctgccctgcccgtggccgccgagccctacctgtaccgggaggccgtttataactcagtggctgcaagaaaggggtctactcctgacttcaccttctacgacagcagacaggcagtgatgtctggtcgcagccccctgctgccacgggagtactacagtgatccgtctggagctgctagggtacccaaagagcctcccctctatcgggacccaggagtcagccggccggtccccagctacggagtgcttggcagcagaacgtcatgggatccaatgcaaggccggtcacctgccctgcaggacgccggtcacctgtaccgggatcctggaggtaaaatgatccctcaggggcggcagacacagagcagggctgcatctcccgggcggtatggacgggagcagcccgacaccaggtatggggcggaggtgcctgcctaccccctcagccaggtcttcagcgacatcagcgaaagacccattgaccctgcccctgccagacaggtggccccgacgtgcctggttgtggaccccagttcagctgctgcccccgaaggcagcacaggggtggccccaggggccctgaatcgtggctacgggcctgcccgggaaagcatcccatccaagatggcttacgagacttacgaagctgacctgtccaccttccagggtcctggtggcaagaggaccgtgctccctgagttcctggcctttctgcgggcggaggggctggcagaggccacgctgggagccctactgcagcagggctttgactccccggccgtcctggctaccctggaggacgcggatatcaagtctgtcgcacccaacctgggccaggcccgtgttctgagccgcctggccaatagctgcaggaccgaaatgcagctgcggaggcaggaccgggggggcccgctgccccgggcgcggtccagcagcttcagccaccgaagcgaactgctccatggtgacttggcttctctgggcgctgcggctcctctgcagacagcatccccccgagctggagacccggctcgccgtccctccagcgcaccatctcagcacctcctggagacggcagccacctattctgcccctggcgtgggcacccatgccccacacttcccctccaactccgggtacagctctcccaccccttgcgccctgacagcgcgtctgagccccacgtaccccctgcaggcaggggtggccttgactaacccgggcccctcaaacccccttcacccaggccccagaacagcctactccacggcatacacggtgcccatggagctgctaaagagggagcgcaacgtggccgcctctccgctgcccagccctcacggcagcccccaggtcttgcggaagccaggtgcacccctggggccatccaccctgccgccggccagccagagcctccacacgcctcactcaccgtaccagaaggtggcccggcgcacaggggcacccatcatcgtgtccaccatgcttgcaccagaaccaagtaatacatcctccccgcctgccctgcctggggacctggggggagcaggggggtgcggggttgtagaagtttgaacataggatggcaagtcctcactcaccaggccacacacacacacaccaccaaacaagaaggacgcagcactgtggccagttgacacggcttctcttaagttaatcagatttgtgtgtcaggccagatctgctggggcagcagtgccctcctgttctttagttgaggtcgggttgatgtgtagatttcccattacggtggtaaaactcaactgtgtttcttggagaaagtcgcaagtcactcagaacagactgcagccttgagctcacgaggggtggccctttctgtagttcacactagggaactttggagaaggcaggaacgtttcatcaaatgctggctgtaaagtgtgcatcctccatttagaagggcgtgatcgtgtggaaacgtacctctcacgggtccgcacgccgtatcagaggcagtgattacccaccgtggagatgaaaatgtgtgtgtttgcatacttgtgggttaaacaaagcaagatgttgaaatccctcagaactcagtttcaaaaacagatttagtctctcatatcagaaaatacagttgggaattccgcgtgcttgaagggaaggatatatttccaagtccaggaaagggagagtgatggtaggtggttttcttcacaacatgtgccaggtgtgatttatggcgtgtgtttccttggacattgtggatgaagtcctaggtgggcgtcctcagagcaccatttacaatttttattttaactctagagtcttgaccacaaatttaaaatgtaaatcagttttcttcctttcaaacataattctttcctccccgccagcctcccctacgtcattcagaaaacagaatccttttcaaatgatttttttttttcctgaatagcttgtgaaaatcaggatgaaacaataagatctacctttttgaaaatagccctgaagcagctgtaggcggggaccgaggcgctggacctcacaaccctgcagagaccaccttaagtttctctgccatcgctgtgtggcccgtgtgtgctattaatattacctcctagagatgacctccaggcattttgcattttgtttccaagtggagactgagcaactggcctgattttctgctttgtcgtatagattctgattttgtctcatggatttttttgaagtctgatcacatcattatttgactttctcaaatacatgtgcggcaggagggacgtcagataatttttccgagggcctgtgcctgctctctcagtcaaacattctttctttgcaaccaactgatttgcatggcgatgacatttgttgctccagtaatttcatctgataatggccgggcttgcaaagcggatctgaaaacatattccttaattatgtgttgctaagtgacaggagggtttggtcataatcacagaaagattatctcctcacccaagtcgtggaaaggttttgccgaaggaggaacctgtaagattgccttttcttttcttttctttttcctgtttattttagacttgccttttaacaaaaacattcgccattatttgggtatggagtgaggggtattatataagttgtttgcagtgtgattgctaacacgatgttttacagaccggaggatattgatttttacttaatttgcgtggcagcgagccagtgccagggaagtctgcaggcagaagccagccagcaaatcaaatgtctctgttaaatgatccaccccatagctgcagtttccctcctcattccttatcgtatgctgattgtggcattatcccccacaccctgtcgggaagggggcaggggctggcgtccctggtagcgcttcagctgtgtacatggctgtacgttttgtacagtaggttccacagaatccgcagtcacatttggatctgtcggagccagcagggaaagtagacggtgtgtgtgtggaggataatgttgacatttcaggaaagcacaggctgggcagtcccgccggcctctggtccaggacgcggccatctggaaatccagtgttgcttgtttgggacgccgccagcctgaacgcatcttcgttctggtgccgcctaactcaagtgcttccctcccatcggagggacaaggaacgcccttctggaagttgactctcttctccccttcgggatgggcggtgttgcactgcttatagtggggtggtttggggtttggggattgttttcagtatctattttattttcggatgctttggctatttttaatgtatgtttgctttttctcagtccacgaactacctgccttatcttggtgggttttgtgcatacacacaataggctcctatttctagtccagtttgctggccaagcagtccagagtgacaacgtgaggaaggcgtatgctgcggggaccccagtgcggcccaccagccccggtgacacagacaaatgggggctccaggcccgcgtgagtggcagcacctggcaggtggtggggtcggctgtcgctctcaggctgacctggccggctatggcacaagtcgcggagccctccggcggtggctgcgagccagcaatctccccgtgtcacgtgctgtcacccgagccctgcctgcaccagatgcagcagggatcatcagaaacaacgaacgaatggggctgcggccattttcatatctttgtcttcacaaaatacagccaagcctgcagcctgcacagggctcagctcaggacacaccctgggggcaaagtttcagatgtgagaaacgcagtcccagcccaaagagccacaaaaagatctttctgagctttttccattttcttccagccgtttttcttgatgcaactggattaatgggggcacatgtgacccctgtctagttgcttagggtcactgcctgaggactccaggatggagggaggagcgcgtggtctgtgtggaggggctgttgaggaggctgatggttgtgacagttacctgtcaccagagctggtcactctcatggcttcttttcgtgtggcctcggtttccagcaactggaggtgtgaacgctgatctcctaggtagaaagcacctccatcaataattttagccctatcagaatctgtatagagggtcgccgccatcggcccacacccctgctgctgagtcctcaagcagccttgcctcttgtttgagactcctctgcaccttgaggtctgtcctggggcagaggacgcactgctcttgagggtcttgacccttaaaccttcggcaggcttcccccatctcagagcacaaggacatttgggggtgaggtccaggggctgtgaccccaggctggccctgcagaccagcagagggatgagtccagcccttcctgtgtgctggccatgcagtccagccagagagagttgtaagggagcaaggaaacctcttccgggctgcccccaggacccctgagtcctggacacagaccactgccctgggcagagcccagcgtgagcttagaggcttgttcacttcttccttccttcctcattgacctgtcccctgctgttccttccttccttcctcattgacctgtacccctgctgttcttccttctttccatccttcctcattgacctgtcccctgctatgtgccaggcctgtggccagatgtttggggctcccaggtgggcaagacccaaggcttgtgtttaggtgctctctggtctgggggccaggaaaggcaattcataaaaggacagttaactgtgactatgtatagcaggcaccaagatggggcctgtggagcacctggagctccagggcttcttggccactcctatgcttggaagagcgtccctacagcgcatgtgtgtgcaccggcagggaagcaggagaagggcagagctcagcaccgcagccagactggggccaggggagaggccaccgcccaggccggcgtggggcagatggaagtgtgtgcgtgagctgtcgtgtgcaagggcagctaagggcctgactggtgttttgagactccctgtggcgtctcttttcttgcagagtaatctatgcctgcgtagtaaaaacattccagcattgtggagccacatagccaggactctgcccctaccccagcctggtagagcaagaacctcggcatggcctcccttccaaatccaagagcagctgaacggttcccaggtgctgacagctcagccttttctagcaaaacattgaacacacccgacatcagtgagctctgcgggccttccgtttggcttttgtacttgatcagtcattgggtttcatggcccggtgttccctgcattcagtgtgcccctgggcaagtcacctgctactggcctctgtgcctctgaggccctggttgtgactgatgcctgacctcctgagactcccagcccttcttgtgacctcgccagatcaccctccgccttcatggcagaacagcagtgatcatccctcctgcccgttgctgccctgaagtattcgcatcttggttgtgcccccttaccagactgaactcagcgagtgcctgaacctggcctcaccctttgttcatggagctcattctgctaggctagactgggtttcttggtcccctttcaggctcctggacgtgccgtagaccccaggaatatgatttcagcccaggagcataaagtagttgaatgcatggcccgaaggagtgccacctgctttgtgtttgggcaagtatgttgagttctctgtgcttctatttccatgtctgtcaaagggggtaggtcttgaacctgtttcctctgcttctgggagagcagtgagcagagaaggaagagagggcttgtgtgttgaggttggagctgcctggcctcagcggggaatggcgcttttcttgtcgtggttgacccttggcctcttctcacactggactactgaggccctcggggtctcaggggccaaacttgtcccccagctctgccgccttcacagcacttcctctgaccccgtgggtgtggatttcattctgtccatggaggacgtggggtgagccatgccgggacaactagacagcggccaagctgctgaagaaggccctgctgtggtcctcagttttgtgcaaagactgctctcctaggcctctgtcttgttaaagcttagtgggccttttttcaaaagtgagtatctgggaatttctgtaagcccaccttgcatagagtgtgtccccctcgacagcgcagaccccctccacactggtgggtgggtgatctgaccaggagtctggccagagagtaacgtggatgcttggtgtcagctggctggggtcgtgagtctcaggccttgtgcgtaacaggctgggctcctcgccgcatctggagagctccaagggggaagaggtcgacaaatgatttctgccgggcgtggtgcaggactcagagcaggtggtgaatgaggtcggcgcttgctgttggtttaaagggattgacccgtgttttcatgggaggccatgtcagccaagactgctgctgggaccttggccagctctgcccgcgttccagtcaccagaccctcttctgtctgtctccacaaggcccgcgttgactgacctcctcatgtctacaggggcgttctgtcttcctggtttagaaagcagttccacatggagtagggaggtcttggccagcggaccctctgctttccaggaagcaggtcatggggccatagcttcagtttctagataatagttttgtgtggctgtgctgtccccatcccatccccccaacccccacccagtgctgtgagaaccacatcacacctggaactctgtgcatggccaagctcagggcctcctaaacccctccagggattgttgctcctctgaaatctttaaaagctgttgatcttggccaaggtatggttcctattttcctggaaggtttgcggagccaagggcataagtacctgagcagattccacagaccaggtgagtggccccatgttcacctggccataaaaacaaccaatgggcccctacgctattttgctttaactctactttcaaatgtggcctttgctcttgagtgtccagtgtccatcctggggctccacaagtcacatttcagctctgtcaacctcagtgcttgagttgagggtcttcctgggtcatggggcccaggctttttggtgtcaggcacacagtttggaaatagttctcccccattctgtggttgttttttcaatttcttgatagtgtccttgaagcatgaaagttttaatttggagtcttacgtatttgcttatgccgttggtgtgacatctaagaaaccattgcttaatcgagggtcatgaagatatattcttatgttgtcctccaggaatgttagttttagctctgacattgaggtcttgatctgctttgagtaaagttctgcatatggtgtgaggtaggggtcccattcagccagttgtcccagtgtttgctttgtgctttgcagaagctgagctgtggagagctgggctgggtagagcaaaattagagcttcacgccagacttcttgcatttggaaactaacattctaaggaagaaagacgtggtttttttttttaagtgagaaagccaacatatattaacaggaaagcttttcaggtgtttggcacaaatttatttacccccaagaacatacgaagccagaattctaaagctttttcacagattccttgctcatacgtgggagaggtttttttggtaagtttatgaaagagaaatagtacttgtaatccataactaattagcccacgttagcgatgtagaaacgagtgtgattaaacgtgcagttgtcaggtgtgtgtttcccactctgaggctggcttcaacaaagggctttctagttgttttttacataaaggataaaaaaactagccttcgttcacttttcttgccccctccagtgggagggaggaactgctgaaggaacaggaaggtacactgtagttaaatttagcccaacagcagctttcagcatgtgaataaaacaacttttgccaaattgttaggagagcaaaaaatccaacctagaaacacccgtccccactgacagagtgggcggccccctgggacatgttctcctgagagccatggagaaattcatcccaggagggtttgcaaatgtcaatgggacatggggcagcctgtggctgagttagcaccctgggtgtgcttcaccagaaggggcaagagtaggaaccctgattcctggtcccccaatgcagttgtgtgggatgccagtggcgttggcggggagcgcgtcctgcaataccagctagatatgaacacggtgcctccgcagggctggtggggtgcacctaccccaggtggcccatggaatgtgcctcttgcccctttgccagggccgaggtaggggaaaccagccttgagagaatctagggccctgactgagttcagtaaatattagtaattgtcactattgtggagtttgtttgtttgtttgtttgtttgtttgtttgttggttggtttggtttggtctggtgctttttttggtttttggtttttggtttgtttttgtttttttgagacagagtcttgctctgtcacccaggctggagtgcagtggaacaatctcggctcactgcaacctctgcttcccaagaagctgagaccacaggtgcccactaccatacctggttaatttttgtattagtagagatgggatttctccatgttggccaggctggtctcaaactcctgacctcaggtgatccccccgcctcagcctcccaaagtgttgggattacaggcgtgagccactgcacctggcctattgtggagcatttgacaaggatgatcccccatctgaaatcccaggaagactctggacatttttcctctgacagactcagagaggttcaccccctaccctgagtcccacagcagggggtggcccatgccatgatgatcctcaggcacggtgcattagcacagcaagggaaaatcaacaatggtatacacttggggaggagacaccagtccgagctggaagccaaggtctgtgtcagcaagaggaaacaggacaaagtggctgggctctggagcaagagtcatgacgggctctggagcagcagtcatcatgatgggctctgaggctcgcttcccatgggtaacactggggtgatggtgcccaccctacctgccccccacggctctgagaaccgcatcacaccggagctgtgtgcatggcaagctcagggtccccagctggctccacgagcacctgctggtgtttgcctggctccagctgctgccctcaagaccatgctgcatctgagctgctccgactgcggggccaaactccttgccctggatcatgctgctgcctgggagagttcagggaattaattctcccagtgaagagcaaatgccattcttttgtgtgattaaatggaatgtaaaatgttctttggtcataagaggatttaagctggctgttgggaacagctgtaacacacacaagggtaaagttttaataaatggaaaagtaaatgtaggaaaaggtgagggagggtggtagggccggaacacagcatcccgtgcaatcctgtacacaaggataggtgggaattctgctctgagcttcctagcaaccaaagaaagagggaaactgatcacatagaagaatcacactgcatgtaagatgggaccgatgaacccgttgctcagaagcagaggtgagtttctcctgcctttatcgcctctccaaagaagcggcatcagcgctggtttgcagtttgctttctggcattacctccctgctcctcagcctgcaccttcctccgctacccgtcgacagcctcctgcgtgtcaccttctgatttcaccagggcctcatcctggttgaagttgttaagctcttcttgcactttggctggatacagtcagctgttctttggcgctgacttcccccggggttcctacctcctcttctggccctgcctcattaagggattgcattaagggatttttcgtggtggaaggaagctctgcctgcggaactgaatgttggcaccaactgcccagcgcaggccagtccattccccttccatccacagtgcttagagctgacctctggcctctcaacccaacacgtttccccactggggatttgcctattagatgctttttatatgaaggaataaatatgcctttgtgatgggttctagtgttttcctgtaaactgggctctgagcctgggatgctgtagaagttactagattttaagaaaaagttagagaagaaagaagagtggaggcggcatccagccagctgttgtgctgagaatgttcacttcctggctgtgagctgggcctgggcgcagcgctcttggcccttggcctgccggacagcagtcctcgcggatcactttcctcttgggttttaggaccactcgaaaaacgagagtgtgctgcaagcatgaggcttctccctctcccatctcagccttggctgccatagctaaggaggagggtgttattttgcttttgtggacattcaccctgggaaataaggtgagaaaattaagactgggtctgccaggctacaggctactcagggtccttttgcgggaggacgtgttgttcatttctctggaacactggtggaattggtccatctgattccaagggacaagccagcagccagggcggccatccagagggctcctggtcccggcactcatgggcagccatcccctcgggcagtgactcagtggtggcccctggaacttggcagtggcactcggctcgctgcaggttcatggaacatccagggcgtttgccctcctggttgctgctacttcctgtaccttggaggaaaagtcccttggggcactgggaagggtgggcggggcctcatggccttcctcagcctgatcgggacccaccaaagggtcccagaccccagtctcactgcaccctgaccatccccttccccgtcaccccgggtggtgccagagcctttttgtgaggtgcagggatccgggtacccagcgcacagtaggcgttctcaaactttcacacagtgagaagtcagactgagccatccatctctgggttgcctgtggcctttttagattcctgcagaatctcacccagccccgtgtgtgtccacactggacacgctgccagcccagcacccagcctcttgtgcggccggcgagtgagtgtgcagcagctggccgctctgccagattcctctggcaacaattcgtacttttctcttctctattttcccttatttttctcaaacatccccttctgttgttgtcaggggcacatttttagaacttgagagctgttcacccaacacctccaccagcggtatccacacagcgggcgggcgaggcgccttcttggaagtgcttcggggagcactgaggccagcccatccctcctcagcctcgagccagagggagtcctctagggtttgggctgcatgggcttccgggacgccctcccaactgcaagaccgggagtggacggagggagccctgggagcccggctgtggccccagcgaggcaggggaggatggccaggccacaccagggaccgcacagcaaaggctctgtttcaaaaacagacgtcacgtttcctgcttgtggcctgtggggttgtcactgattttttgcattgatatgaaaaccagcagtgcttcttttccatctgggccatggctcttctggggacagtgcaggactcgaagagaagctaatggccttgcttgggtggggatgactagttttttcttttgtgttggtcacttgctggcaagcgggttttcccacctcactggctggttgtccagcagcgtgaatccgctgcctgagaagtgagtctccaaacaatcacagcgggactgaccacgcaggtttccccattactgcgctatgaagctccctcgggctccggtcactcagacctaatgtcgaggaacgtggagcacatttttttcctctacccaaggaagcagatgtgtggtagctggtaaacatcctccacaccgcagagtatcttctaggaaaactgcctggtacggggagcttgggttgacgaacgctcacttttcttggtttttattcgcttggaggtgagatctgatgattggcccttctctctggttattgctgaaaaggacagaagggcgtccctgccggccaaggcggctgctggtggctcaacctggagagcctggattctgagcagccgtggtcactggtcttgtccaccacggctcagaactgggtgaaactcagctccccaaactcattcttcccgagactttaggggaagtgcttccttccaagtcagtgctttctggagggctggtgttcccgtctcggcaagttctgcctggccagaggcctacgggctcaggcatctgaggcacagggcatttgggccatttgccaggaggccgccaagaggttgctccccgtaaggaaggtcaacctcgtgtgcattgaatcttgcattaaccctcttagaggccagtgttaagggccaagttgacatagatccatttcttggatcaggtgtttgttttttcagttaattttttagagccaagtctcactctgtcacccaggctgaagtgcagtggcacactcatagctcactgcagccttgaactcctgggctcaagggatccacctgcctcagcctcctaagtagctgggactacaggcacgtggcaccacgcccagtaaattttgtagagatgggatttcactgtgtcgtccaggttaggacaaggtttcttatcaccggggccatgaatgcctgctgggccaataggacaccgtgaggaggaccgtgtgtccctgcatccagcttggggagtggggccagcacacacgtgttactatcctgtggcgtctcggtcttgcttggatgtgcccttctgttctccgccgttctgataacagttaccatgatgacgtctcttttaggctgcaagatctagagagacacccgggtgggaagagcgcatgcctcacgtgagaagcctcaggcccttggttcttgattttgtgtgcctggttgatagatcgaacaatcacattcctgcagtaaaagagagagaactttaagacctacctcagcctgccgaggcaagatcacctgtctgtttcctagggccaggcctgatgatgtctgtctttccagtgtccagagcttgttgagttgaaccaatccagcaggtggtttgcactgcggtggaccctggggttgcatgcttggtctctggtgtcagagagacctgagtttgagtcctgactccatcacttacttgctgtgtgaccccgggcaagttccccccgcctccgttacctgctggggaaacagcagcgcctacggcacagggttgtgtggagggtgcaagagaagtggccgtgaccatccttctaaatgggacaggctgtattccatggtcatgatgctcagcatatggtataaggagctaactgtttaccatccctttgttaccagaaacttgactccctgtgtgtttgggttcttggtgcataggtgattttattgctgcaataaagtattgaaaaccaattaagtaaaagaggctgacggcagcggtgcccgcacgagactattttacaacttcgggcgtttccagtctcaggtatttccccagcttccaggcacatcctgggaaagtctagtctgtgtctaattactgtggcacagaatgcaccctgcccacatgggatatgtaaagtaggggtatcccaggcggccccttggctacaggcagctggttttcattacaggtgaggctgagcagatggtgggcattcttggtggtctttccaacaggctccagaccacctcacaactcggagcttgggcctttgaactgagaatctcatagtttaggagctgtgggctggaaccacatgctggcagctgccaccctcgagacagaaggcccatcgccatagtcatagcattctttgctgctggctggcagcttggagaggcgaggtgggcacctcccaaggaggaatgagttaggtggaccagccagtcctggttttgacgactgagttcaccagggtgaacagatagtcatatgggagcccctttttgtccttggcaggtttgtgcttcttttggccgggcgcggtggctcatgcctgtaatcccagcactttgggaggccgaggcgggcggatcacctgagttcagaagtttgagacctgcttggccaacttggtgaaaccccatctggaaggctgaggcaggagaatcacgtgagcccaggaggcggaggttgcagtgagccgagatcgcgccactgcactccagcctggacaacagcgtgagactccatctcaaaacaacaacaacaacaatttttagtctttggcgatgccctgaggctcatctcttccacagaggcttggaggatcggccacacgagtggggtatgcagaggcacaggcaggtgggggagtgagaaccccagggcgcatctgaccttggcgtgccggcaggaagagaacaagcagtcctcctggaagattccaccagaactgtttattggacaggggactcagacgatgtgtgtccccagccacagtggtggctgagagtgtccctatcctgtgcatgagatcctgaccacccgtccctgcagggaccgtccccgtgttgggaagcaggagggtatgtcgcagagcctcacccagtgggagccacaatccttattccttgctcctcaggcttggatgttgctccggcttctatcccccacatcctgtcctccctcccggagcccagggaccacccatgtgaggctgggccactggggaaatctcgcacacgtagcgcgtctcaccagaaatagaagcagagcctcacgtccttggctgcttcgctgtgggaatgccttctaaggcgccgtttttggtgatgtcccttcacggatctttcaggcccagtgagtcagcagtgtctgcattcacacaggctgggtggggttgttggatctgccccgggtggatggcacctgctccctcagggcaaaaattcaccccagaacatgagctgcacccggggttaggtgaaggtgacggagcctgaacactcaacaccagaggcagccaacaggacggtgtctgggcttccaaaaagccaccagtgcctaaaaacactttcaagcacctaacatcactcttggttttgtttttattttaaactccattacaaaccgggaaatagctgtcactttcctgtgttctgggcccgctgtgctcctccgttccgcatagcgcggacactgcagggtgcgggctgcagcttccccaggggctctgaggaacccgttgaagtgactgcacgtgcttgtctttctagggttgcagatgagcttcgttttcaggggggtttgtattttgtgttttttctgaacttgatggtgtgggtctggacatctctttccaaccctggaagataccacacatgctcttcgttattaacatgatcacccagaaagcttttgggggcctgagaacatggcccaggctctggggagcatcagactgcacctgactggctggataaagacaggggtacctggagcctcctgcctcgccagctctgtgtccagctgtcacctgagctacaagggagattacctgggagcctctcatgtgtcacatcgtgactcattcagatacatgttttatttaagaagcaaatctatttatcagggtgttcctgtggccatttcttcaccaaacctccagctgactttgcagagaatgccaaactcagaagccgaggagtagcttaaaactaggttccccatggggcacatccagccttctggggagcccacttggtgtggggcaccccaaacagcacagcccctgggtgctcagaggccttggtgaagctagatttcccaacactcgattttttccctccttacagaaaagcagggggaacttgagggataattcacatgaaacctttgccataaacccttttaaattgttcacaagtaagagcccaactttggaagattaagatcctggcgtttttagtgtgaggagtgggctggctgaatatgctgcagattgtgagctttttcctacctggttgtacctcactggaggaaaaataaggataatccctatagctgctaaggatgtacacggtgatggcacagccatcaccgctttctaagtttagaaggtgtgcttcatgctttaaattccccggcactcattttgtaccacgctgctctctcattctctcctcatgctgtcttccagtgcctggttcaggccagtccttgtccaaggttgagttaaatcattttcagctgggccaggtcttcaacagcttggtgtgtgtgatgccactccagggctgaggtcctggcttcaggaagaatgtggggatcgattagtgatgtctgccatgaatgcagaaagagagataagggttgcgcatttgcattgcatggtgggaggaggagtgtgcacatgagccagggaatctgttgggcgtgtcaggtgatacttaaaactcaaggattgggttctccattctgggggagcacatactacctatacattactgagactgtaaaatgaaatcgcagcctctgggaagctgggcaaagaagtggacgcagcattgggagagcttcccagaagcaacacagagagaaagcccatttgccaaatgaaaaagcagataacaacgtagaaacaaagctgagatttccaatagcagttgctttttttttttttttttttttttaaccttaaaatagtgccactcttagcaacacagattttcttccaaattatgccttgaagctgctcccggagccacccgctcatcagcaccctgctcctgtggtccttctcgtgaaaggcagaggggagatgcctgttgcccgcagtcttctctgcagctgccgtgggaacaggcaccttcccggctgctggggacacaaggagggggagtcaccgtggcttgctcactttccagatcagccaactgcagaacatttgttgttgtttagatcccacgtctgacggtttagaacagcttttataacatggttaaacatgtttacaaagcaagggagacatctcttaccttgacaacacgaggctcccacagaccgccttcccccactcagagctccacagccctgtgtgctgggctggcctgtagacccactgaggcagctgtgtttacaagtctaacgccaagtgtctgagaggcacttgcgtacgtcccagcatcagaatctggcccccagcttggccctgtcacgattttcagttttatgttgtagaaacccaagcctctgaaataacactgttagcaggccttagttctgattctgtgtctggctttctagaaatcaggtctgctgagctcagccagtggggatcgggtcatgctggattgcagaaagcggccacttaattggggagcaggccgcatttaagaggaagcttttctgagggtggtgggatcggtgggatattaagtggggcttccttggaggcaggcggggcctcaggttcggctgtgttgggtcactccctgtcccgccccggcctctggagtttgtgtggttttgtctcctctttcttcctggatcattgtgcatgaggctgggagccacaccggctgcttaggctcctcctgcctcccaggccacctgcaggtcacaggggctgatgaagccgtgaatcgcttggctctgtttggaatgctcgttccccggtgccataaagaaatagcacttgaacataaatttaatttacttagtaaggccatttttactttctgcagaaagggtacactctccagcagttttcccacgagagttcacccaacaaaggacacagggtcatttataacctgacacgtccaccctaccgctgtgtccagtttccgttggctggaaagggacctcacattctctatttgtcccgattggctagcaacttagaacttttttaaagaggcaaaggtagaggggaacaaaggaaggaggaagtaacttgtggaatgttgagaaaggtaaaaacaccttcaaataaggaagaggaacaggctatgacctaatgcttgcttggaccagtataagcatgctaaggcaaatatttaggctaaattgcgggagctaagaacataacgtacattgatttccttattacggctagcaaatatttaagaatgttagcacagatctttgaataaattttgcctctaagagaagttagtatttattcctaattagacggggaggaaagtctttgaagaggaacctctgctttactctgtacagctcggagctgcttgcagcactctgacaccttctgtcgggatctttggaagacctgcctggatctcccgtctgtggaaggatccaggtacttcttacaacatctgtgttagggcagctggtgacggcacccggcaaattccagcaactgccctcattccacagaggctccctcctgcaaggccactactgtgactctgagcagcggttcttctcatgaatgtgatagctcggtcagctctaagactgcaacctgcagggacttcatggggcaaccctggggtatgtggccagtgtctgtccttgggcagccgtagcccctgtcaggaacagggagtgactcaggcactggtgtcttgagactgctacggtgtcaggaaacttccataaaatctagtgcgttttaaaaaaagaggccagagccggccaggcacggtggcttattgcctgtaatcccagcattttgggagaccgaggcaggtggatcacctgaggtcaggggttcgaagccagcctggccaacatcgcgaaaccctgtctctgctaaaaatacaaaattagccaggcatggtggcacatgcctgtagtctcagctatttgggaggctaaggcaggagaatcacttgaacctgggaggtggaggttgcagtgagcggagatcgtgccactgcattccagcctgggcaacaaaagtgaaactctgtctccaaaaaaaaaaaagccagagccagcctttgcctcctatgtcagaaatgatcatttgcagctgctttgctttggggtagaagcctcaaatcctgaaaccctttaccctggggcaggttgtcttgtgctgtaagcaacagaaacccatttagatcatttttaaataatgagaatttctgttggaaggatgtcggcttagctcacacagtgtctaggaagactggaaaatgggtctcagaaacactgcaggcagctttgtgtggcaggatcaatccagttccttcttggtgactgctcaggggaacatcccatttgccttgcatggtactgagccagaaggtcaactccaggcctgtctgcctgtatccgagaaagcagcagctccccacaatgaaatgtagcgttttccagctccggatccttccgccatcctccctgagatctacctgccttaggatctgtgagatccacgcactttgcttttcctgggtgtctggttactgttcacaaaagtccagcagtttggcctggtgttgtctttgtttttgactgagcatctctcatttcacaagtatttattgcagctgcagctctaagcaataccaggcccagggatgggcgtcagcactgccttgagctggtgcacagcacatcccggacggaggggcagggccgtcctggtgcacacgcaagcctgaaaccagatagtaattgataccaggggagccggcagggctttctgctctacacagttaatgtgggcaagctgtcaacagtaaggcactgatgtcatttccgtgatgtgtccagttgcagctggaattgtcctgaaatggacaaggcaggtttactggcgggagacggtagaaaggaaaaatagcgcatagagggcaccagggccctgtgaccctcgtccgcaagtgtctcctcatacctcgtggttgcgcaccgtggtacggggccaccctgagcgctgactcccgggctgtgaagtgggaagaacagcagcactgcaggactcttgtcagccttgtggtctgtacgcatggaaaaggccgtcagctgtgcatagcaactggaagccatggctttttagcataaagcccagttcttcggaagccctcattacgtactgcgccttgggctttctcctcgcaaattcccaatcctgccccactgggcctggggaccccacgtccctgaaagggtcgtgttccatcttaatgtatatgaatcttactctgtgtgtcagttacatcctaataggttaaaaacttgctcaaatggtcagaagcctgaaagaggcgtcaggaatcctgtgtgaggtaagatgggggatctgtttgcaccttcatctctccatatgagatcttccatatgagctcttccagaaacctctgccccaggctccagcaagcctgtagggcagcggctgctaggcaagggcttgaatttcagtccagattctctggtgtgtgggtggacagtttccttctgggactgaaggagcacttggaagatggtgctttcccttctagagcaaaccttggcattgtcccagctaagctctcatgcccagggcttgggggtctcctgtggcctccatatccctgcacctcatgcagggcacgcaagcatcccacccactcccaaccccccacctccagccgtcgtgcccggcatcttttcccagcatgagaacccgttggcttttctcttttcccgccttgccatgaaggacctgctgccaggattcgagcctcagaccttggacaggtctcgggccagcctcagccacgttctgcgtgcccggccatcagggagggtagagggtgggtttcaccaaggagaaaggcaacccgtgtcggggagggagccgatcgctaggcaacctggagtttgttaccctggtaacggatccatgcactgatgatgctgcggatggacatcttgtgacaatggcctctcaggctccccagacgcatcagcggctctggattcccaccttgcgcccagcgtggttttcctgtgtggctaccatttaacgaacagcttggatttcttataatcaggcactctctccgataaccatcctgccagcacccctgaaagtgaagttggggtgttcctcactgtgtgtgggcgaccgcctggggcatgagaccaggacttccaggccccacagggttgtgcgctcagacctcaagtaggggccagaagagtgtactgaaacagaaggaatcttgtggaatttggcagttgtaccattttcttagcagaaaacaggagcccaggtgggagccatgtgtgtcgggttcctcgtcaggtgacggtgctgttgcggatctcgcggatgagctgagggggtatccagctttgtgctgcacgcttcctgtccactcatacaggtcgtgggctggtgaggacacgggggtgttggccctcgtccctgccttattttccccctcccctgccctgttttcctggtgcagaaggatgttggagtgcggatccatgcggacaccctgtttggggacctgggtgtcggggcagcagcaggagtgactgggtgcacgtgtgcctttggtgtctgagcgtcaggtgcagctgccgctcagggctgagaggggccatgatttctcccagccgggggtggcaggagaactgcacttagcttgggggccatgcggggctggctgtggacctggctaccccagcccattcttctgaggctgggacaaaagccttttttgtactttgtgctcaaagagacaattatcccaagtcccactggccgagcacggccttccatgcagggctggtgcaggtgctctgggccgtccctccccagcaccgtgtatagtcttaacaggatgcagtcacggccccagtggagggggatttccttcctcgtctccgagcgtgtggctaacggaatatgagccttggtggtccagcaggagcccccccgtggctggggtcccagtcatcgtccccaccaagtggccagcttggggactactaagagcccttgaggaggttagggatggaaggcgaggccacacagatgaagttggcctttgtggaaggctcctgcttttgcctgtgggaccctgagcctgctgccttgtgctcaaaggccagtgatcccgggaatgtcacaccttcctggttgggttacccatggtgggtcaccaggctgggctcagcctggagcaatggcctggaccgtccagcctcagagggagggaggggatggggatgtaaggccgccgtcagggttgatctggatatctgaaaagttgatgagccccaaagttttaatctgaggctaaagagttctaatttgacaagagacattgccccttcctggcatctcggcggattgcacctctggaactcaggtagttgttctcttgtgtccagggtgtgggtcttgaagatgtgaggtttgggcagatggtcaggaggacctacgaaatccaaggatggatttgaagggggcagtttttgttggagaaaatgctgcttctctgtctctgaggtcttcggagcctgctgggtttgctgcacagaataaagagagaaaagaggccctgaggctctcgctgcatcctgggcgggccccgcagggtgtctgccctgtatgtgcacggggcgcaagcatgcgcgtctgtagtgtggcaggtaaggccttccaccaccctgctgaacgtctagatgcagccgcgctggtccagatgaagttgctagagaatttgtacttggacttgtgggaaggaccactggggcccttcctggggtcacccctgcccctctgtcctcacagctgtcccttcaccttgttggcagcaccaggaaatctgtcaggattaatatgatggctctggcctgtctagagagctgcttgctgtgtggtcctttgagaagtttgctctcctgagcccctagaggcctcctgccctcaggcataccttccctgccccagacccgccatttctcctcacccagcgcaggtgagaggggctggaggagcctgcccaggccgcctgtttgtgcagggcctgtccaggaagttcctttggacgcacacgccttatcccctgtcatagtgtgtgaggggcagctggtgccggtgcaggcagggaggcacgcggtgcagggacccgtcctgtgctggactagcctgtgctggcctcggggccccatggtcctgaggctctcgggactatggtctgctggcagggaagcagccgtgtgcgtctccagccagagccgcaagtggatgggaagtggctcctcttcgtgtcagtggctccctggaaggtgatgcaggtggaggcggtgccctcgctgctccgccaccctcgcttgcccaagccctgccctgagtgatgagtggggagctgcccctccacgcaccctgtggccccagccacccacccactgtgctcaccccttccctcctggcaggtatccgcccccagatcatgaacggccccctgcacccccgccccctggtggcgctgctggacggccgcgactgcactgtggagatgcccatcctgaaggacctggccactgtggccttctgtgacgcgcagtcgacgcaggaaatccacgagaaggtgggcccaccctgcccggccggggcctgcactgaccttgggcagtttcctccccagcatccccccattagatcgccccaagtcaccggcaggccccagaacccctgttccctgctttcctgctgaactcctctgcctcaggttcaagggtgatagggccagggggccaggccaagtggtgccggtgggctgcacggggtggggctccgaccctgtgctctgttcccacgcaggttctaaacgaagccgtgggcgccatgatgtaccacaccatcaccctcaccagggaggacctggagaagttcaaggccctgagagtgatcgtgcggataggcagtggctatgacaacgtggacatcaaggctgccggcgagctcggtgagtgcgaggcagcgctggctgcctggagttgtccggagctctgtgggccctgctcgggtgggcttggagaagcagctggaactgggaccacggagcagccgcttctggctgtagcaaggtggctgcctccaggccgggctgtggagcaccttgcggccctgccttcacatgacacaggtaggatagtccctgctggcccttgtgtggggtctgcggggctgtgaggcatctctgccctcagagcaacacccagctggcacaggctcaatttggagacacccagtgccgcctccagaggggagaatgcgactggccacatgtcctctaaaccacccctgctgggtgcgtcccctaaatgacccctgccgtgtgtgtcccctaaactgcccctgccgtgtgcacagctctaggcccctgtccacatgggaacctgggcctcccgttctgggagggcagccttagcagcatgtggtccaggtcagcaccaaagcaggtgggcccctgcccaacacagttgatgacagaggcttccgaagaaaagcagaggcagcaggcgggaacccagagttgggggcttcaaagctgcttatcggccccatgcacttgcggctgggggtgcatgttgaggggggcctctgcccagcaccccgtgtgagctcgtgagtgctgagtgcagaggcacaagaagcagaccgctggcatcgagcgtcctcgggagagggccaggtgggcactgtgcttgctctgtgtttggaacacgccacccctgcattttgggggtgggggctgtactctgccttacgagtgctgaggtgccccaaattcatgaggcaccatgaattccaaggcagcagcctggccttggaacagctcttcctgtgctccaggaatagcccaggcgctatttccccacctctctcccatcggctaaggccccagtgggccccggtgcttccgggacgggctgggtgtcagatgggctctgtgtgtgagcggagtgttacatacatctgagaatcctgctctcgggcaccaccggccacgttttcagggaggccacccccatgggctccagctgtctctccacagccttagcctggggcatggagtgtatgggtcagaatcttagttgaatccttcacggccagtcggggcagcacccaggtaccggaagcactgggtgggtcttggtgtcaggagcagggctggggagccgggcgagcagggagctgcccgtacactcacaggggtcaggacgcagtggggtggggctgccccacgggcaaatcccaaagcaaaaggccagggaaggagagagagtcactcagattccacaccccttagggtcctggaagcagcagcttcacacatccacccctcaccctccccacacccctcacttgctaccagccacggcgtccttccgagcccctctgttggaacaaagacactccagaagatgtgagtcttcaaaggcgtgtttaatataaactaaaattttccatctttccctggcacaaacaaggatatttttgtttgaaaacaaatgtcctttgtgctctgggtagagctgaaatcccaagtttcaacagcagaggagaatacagcttcatgtgccaggggctctcaaatccttgtcccccgcacctcttgcttctccagcacgtcggcccctcaccacacagctcccaggcccatacgggtgctgaccctgcccttcctcggctggaccagacgctgctttccagggagagaggggaggtccttgcctgtggaacttcctatttctccatttctagaagtgccccgcacaggcagtggggccagaaaggcaccaaggcctcaatgacagggggcctgggagggccgagatgggaggttgtgttccctgagttctgagacccacagaagacgaccaggaccagggactgcggttttggaaaatgtagaagggctgtgagtggtggattttcattgatcctggtcccatctgataagggcgcttggaagacatctgcggggcccttttaaagggcacttttcgaatgtagactctggaggcggaaaatgagcctctgtccagacgtcctttgtctccgaatgcatattccccacatcatgcggtcaacgggccttttgtgctgagggctgggagcggcaggtggctgcaggcaggccctctcctgatgaaagagggtccctcgcaggcccagaaaacaaggccctccatgttgcacgaggcagcacactaggcctctggtgacaccttctgggatcgcaaggctctgagctgtcagccctggaatgacaggcgagagtcagcgcttcacggcaagagcagggcaaggcttgaggaagctgctcacctgcacttctccccacgagccgggaagacctcgagagggccctacacccctccccacccccgccgcctctagcaagctggtttatgtggtttccttgccagcggcagtcatgaagggattaaagcacgatggcactgaccgtgagagaaaagcagcttgcctctttggggccgttttccaggctccgtggatgctgggaggcccagcctgcgagtatcagagccacccatcgtgtggcacttgaaggatcagcttgactcatccagaagggaggctgcatccacagagcgatagaggacagctaagaagatgctccctccgagagagcggtgagggttatggaggttcctggcagtggcgccgccgcggtctgggtgggaaggttctgccatcccaggcagtggctgcagctcttcctcctgcaccatctccccgtcctgggactctgcactccggtgagcagtggaaccacggagctgaatgtccaagttcggtgagaagactgaccagatgtcctgcctcaacctgcctttttgtgccacccacccacccgggtgcctttacacacgtggccttgtggggtctcccagccagcatcagctcatctcctaggaggaggtgctgctgttgacgccaggcagcactgccgagccagccccggcagcagcacggagccagcgtccttgagggtgattctgctgcggggcctccctgctgggctttagcctgcccgaggaatgaaaattgtcccagccgccaaagattttcttgaacctctggcatcagcctcagtctgtctgacttaataataacatggcatgtgatcaagccccagcttctctgctgagctatttcaaatgaatgaggccagtttcctgcaagattcctggcatccagctcgtgggaaagttggtcggcctcagtcaccgtcaaccacactggtcccttggcaggggtcggtggcccagaggagccctcagtggccacgttgggtgggtgggtgacctgctcacagtggcttcaccttctctgagctgtgtgtcttgctaagcgggtcactctcaaggccctagacctaggggtggcccttgtggggagacagccacgcagccatctagaaagtgggtttgtggcacccactggtcttgtttcctgtccagtagagccgaagaagctgccttggtgattgccgtccccaccccaatctgtccccaccccaatcttcaggacttaagatagaggaatcctgggctgccttaaaggtggccctgtcccagtgccttgggcaccccttgctgggagagacactctcctaagggtcccaaagctgggattaggagggaaccatttcacttgggctgacgtgatgcccagatagccacacccctcctcagagagctcaactgggagccacaggctggctgctgagcccaccctctggggccccgcccctggctcggcccctctggtctctgctgcaagcaggcctctggatctccacctgtcgggtgtagggaggggccgttcccagcctggccctctgcctacttgcacccctgttgtatctggcagtcattcattcttccccagacaccctctggctgaggagggtaaatggcagggccctttctgcctatgacttgggttaactctccatgccacagctgctttgtgctgggagatacttgaccctggtctctgcagctcgtgtggggccagagggctcaccccaagccaccctcggccctgacctgaaggctgctccacggggcagggagggcatcctgtctgctctgagttcttcccagcagagcagggtgctgagcacatgaccacagggcgattgtgcacacgcttcggccatcggttccgttcccggggccagcccttgcatccgtgtgggggtggaggtgtttttttaaaaccagtatgtttaaaacgtatgttttttgcatcaaactgttagcatagcttaaaaccaaaagccattctttgtcaccctgccagctccatgagggagaccctgaggggtttgaggctgagtggggtccacttggaggagtctggtctgaggcccactggcttcctgccactccgggtcctttcttgggactcagtgcaagcccaggaggaagccagtcaggcccaaaatcagccataggagttgggttggtcatgagccacgtcctggagcaaaagtcctccttgggagggaggggtagatgttggggctagagcttcccatgcatcagagccagagggcctaccgcccacgtgcccagccccgcgtctgctagacgataaggtgggcctcccccggtgccaacaaccgagtctcaggagggcgggctgggagccctggggcttccccactgatcttgaggttttctcatctccggccttggcctcatccctttcaggaattgccgtgtgcaacatcccgtctgcagccgtggaagagacagcggactctaccatctgccacatcctcaacctgtaccggaggaacacgtggctgtaccaggcactgcgggaaggcacgcgggttcagagcgtggagcagatccgcgaggtggcctcgggagcggcccgcatccgtggggagacgctgggcctcattggctttggtacgtgccaccctctgcgctgacccccaacccctccgacactggggctggtgtagtggggacccctcgggaaaggcaaccccagcctgctcttgaggagccagggcaggcagggccagcaccctccccgtgttgcacggggtaggagatcggagtcaagacccatcaggcaactcaccctagaggcaggatctgggctggttctggaagaatgcgtgtccactgctgtctgtagtgtctggcaggacagcattctttgctgtggggcagcgggcaaggcgctgtgcccagtaaatttccctgggcaggggtgaagggcaggggctgtatggaggtgtgtcgtaaagcagcagccaggcttggggctcgtgtaggggctggcgtagggttcagtggagacgcgggttatggacatggcctcactcctgaaggccttcaaatgccaggttggggtggcacagtcaggccatcagcttggaaagctctcctgagagaggggcaggaaaaggagacgtgaggagaggcccaggagggtcttcagcagggtggtaggggccggtgccacggagaaggtgatggtaagcagcctgattccatgggggctcgaggaggtccccaccctgctcaccatcagggtccacaccacacccaggagacctcggcccattgccactgaatctcaaccccaccgcttaccagctctgtggccttgtgggaattacctgagctttttgcctcaatttcccaatctgtaagtagatatttggtgggatacgtggtatctgccttttgggactccaagaaggcgcatgtgcacacggggccagtaatgttctggcctccgggagactcccagctgctgctcagcccttgcttggagctccgcgcctccgaggacgaagcccccgtgctcctctccccacaagccccgctctggacctggggtgccacttgaacaagagagaagttgctggacgcttccaggagtgcacacctttctgtccccgctacaggctgtgatctcctgggtctggcctcgcccgacgcctggagtctgagttgaagtgtcgggtgctggggatcttctgaaaggacccaccgtgttttgactttgttggaaaacagatgtggtgtgtgaacaccaggctccctctgtccgggccccactgggcctcatggctcggagatgcagcttcatctccatctctgaagcccctcctggggcctcggtggtctctggccaggctgcagagcctgggggtggtcatgagcaccctgggtacacggtggggcctcactggggaggtgcttgtttcaggggcttctgactccagccgtcacgggacttcttcctggggtcgttcctgtagctgtgcccttgtcattcaactttaaaaaccctctcggtgtatagaggtcagtgcagccccctgccgccgccctgttttctcgagactgtacactaacccctgccgccaccaccctggatcctcagcacagggactgtcgtgctctccttgttccctttccaggtgtctctgtagccttcaggactgtcgctgctgcagccatcctgggctaagagcttttgctggcctcgggttctactgagcaagagtcccccaggcccagcgggctcagtgcagcaggcggggtgggacggtgccgccaagagagggcagcctggggctgggggcatggacagaaactgaaggaaaggcagcctgtgggagctgcgcttttaaaataagcggcatggggggccggggggggcgctgtgacgggggagcaggtctcttctgtagggactgggttttgattaagtcagtagcaggattaagtcattgggtcatcagaaaatctcatggataaagttcaaggggtttgtgaactttaaaaaaaaaaaaaaaaaaaacaaagaaatagccgtcggcacggttcaaatctgggcttggtgctctgggctgcttttccacaggccctccaggccctggatctgcagagtgtgagccccactgattgaagcatgttcgtgcacagacgccatgagggggatggaggctgcaggaacgggggaaggcaggcgggggtcctgtgaagtgtgagctcccagcagttgcatgctggggtcctcagtttcatgttgccagtgcgtcagagagccatctctcactccgtccctgccaccgtccagtcctgcctgctgtaaagggtgacactgaggaggagaggcgtgatggttcgtgccttgctatactagttgtcctgcagctgtccctgatcagactggccttattcaacctttgttctaaactacggcagttgtcctagccaggccatcggttagatggagctgctgcaggaggagccatccagcattgaggtacccctggaacacaggctgcctgctcggaaatgcgcatctttgtccttctcctgcctgcaccttggagccatggctttaaagattccttctgtgatctccaagagaaccagtcgagcatcaacactaaccattttgttttcaaaatgctgaaaactgctctgggaagctggaggtgctatcgagggggaccccatgggtttatgaaatgacagccgttggggagtgggagacacctcctcatcctgtgacatagctggcgggaggcccaggctgcataatgcagatgggcgcgaggccccaccagtgggacaggtccaggtctgatggtcatgtgccctgcctcccgcccagaacacagtagcatgtggccagtctgcactcgggccagcctgcagggagccattgtgctcatgtcaccctttgcaggagcgagcccagcaatgaggaggcaggacattactccctgtgacattgagagcaagtttttcaaacacaaagctcatgttaagaagcctgcagtgcacacaagaagtggggagaggggtgggaacggaggacacgggtggtgatgggaggggcatgtgggcttgtcagaacactctgtgtttgaaaatgtcaataacaaggaagggttttgttttgtttttaacaaaaatcctgctgtacccaatataagcagcaagcactgcggtcctcacctgtcctacaccggccatggtggcccctcgcgggcagtgctcgcctcaggcctcactaagctttgggcacacggtttctctggcagcagctaccagcggggatgccaagcccggactcagctcagaagcaatggaggtggcagcgctggggcgcgggctgtggactcactcacctggacgctctgtttctgtacaggtcgcacggggcaggcggttgcagttcgagccaaggcctttggattcagcgtcatattttatgacccctacttgcaggatgggatcgagcggtccctgggcgtgcagagggtctacaccctgcaggatttgctgtatcagagcgactgcgtctccttgcactgcaatctcaacgaacataaccaccacctcatcaatgactttaccataaagcaggtaatttgaaaatagatgccatggaagcttctgtcgaaaggtggtagcacttgcttgtgggcacaagagggacacggagggcaacggaggtggtttctggatacactgttgagcagggaagaggccctgcaacaaaccagtgacaagccacgtgaagccccttcctcgggctgagccaggctaagcagagaaggacaggcgctagccaggacccagcttcagaagcttcccagaacctttaaagaggccagcagctcggcacagtccagcctttccaccgtgttgcttcctctcaggatcagcagcaacggccctggcttccagccgtcaccaacacttcccactcccttccctcaaactgcagcacacacattaaaccaccagaccaacaaaactagcttgcagctttcttctttaaaccttggtacaagagtcttccaccatgccagtgtgcctgtaaccggcttttctttccttccacagatgaggcagggagcattccttgtgaacgcagcccgtggcggcctggtggacgagaaagccttagcacaagccctcaaggagggcaggatacgaggggcagccctcgacgtgcatgagtcagagcccttcaggtgcgtgttgccccagccgcctaccaggagcccacagggcccagctccacacctgacccccacactttgaactcgaggcccttttcccaaacaggtccctgggcaggaaactccagagatgacatttacagtctctgttcttctaaggattgtgctgtattctaattgtaaaagggctggaagtttcccagaggtcatcagggaaaggagaggcagaaaattggtgggggtgtggcagtggttctggtcttcagacagacaggcatcatctctgccctggattacagcaggacaagccttcaatagaattgggctttttgatctaccaattatacggttcttacacaactttgataattacattcaaaaattcccagccttcataaaatatcatcacagatgttcctgtatccatgctatctatgtagctacttttctacatggccaagagctcccttgtgctgaggagggcagggagcgtatgcgacatttcccgcttactctgttttttctacatttttctagctttgctcagggtccgttgaaagatgccccgaatctcatctgcactcctcacactgcctggtacagtgagcaggcgtcactggagatgagggaggcagctgccaccgagatccgccgagccatcacaggtgagcccctccgtgcctctggcctgccaagggcagcctcagctccacagtgcagccggctcctgtcctgctggctacaggcagctctcgacaggtagaattcacttttagcatcaaatttatatgagttgggccctgtttatttacgtaagccctgaactaaacttcacagagggaaccattccctttagtcccagacattataaactcgggggtcggggggcacacagaggctgaaggtcagtgttgaagagctcaagcacttgggcctttggatgttctacatttttacaaatgcttatttccccacataagcagctacaggtgtaatgttgaacttactgtgatttgtaaaaataatatgattaattttaatcatcttaccctaggtcgcatcccagaaagcttaagaaattgtgtgaacaaggaattctttgtcacatcagcgccttggtcagtaatagaccagcaagcaattcatcctgagctcaatggtgccacatacaggtgagaaaaggaactgactttgtctcagcttgtgagcaccacggccccggggccagggagagaagcccaaacttggcggaagcttaacctcccgcagatgctaagtcagggtcagaacaatcagccttctcagcaggaactgtgtacaccgcccccatttcttccaatgcctaatttcatggaacaaacagaagctcctattttaaaagggggtgtgttcggtcagatgtgattgaccacaggtgctaggaactgcctttcattctaaagccatcttaaaaccagaaggcttcccagtcacgtgtggtggcgcacacctgcagtctcagctgctagggaggctgaggtgggagaggtgcttgaagctgggaggtggagattgcagtgagccgagatcacccactgcactccagcctaggccacagagtgagacaatgctgctaccccccgaccccaccccaccaccaaaaaaaaaaaaaaaaaaagggcttctcaaagagaaaggtatacgtagataagatgttcaagtgcaaaggcctgtgagcaagttcattttccaatttgaatcttatgtccacagaaggcattctggtacagtcaactcaggatagtacaatcaactcaggatgatgaccttgtccacacactaaaaatgatacctgtagtttgggtcagctgagaaactggagccatgtttgggaacgcagagtgggggaaagacaggagccctcacagggagaaggggttccttttgtggtattttccatgcacgaatcggttttctcccacacccccccccccattattgctggcttcccaggaaaatcagtagccccctcatgcataaatgaatgaagttgcagccttgaatcttaagaaaaatttttgcatattctaaaccagggtttctagctcttggcaataagtatatttggggccagatcattctcttcattctctcgtaggaggcctggcctgtcctgtgcattgtaggacgttcagcggcatccctggcctctacccacgggatgccagtagcacctcccactcccactcatgatgattgagaatgtctccagccacatgtcccctgctgtagccacagtgacgaccagggtgcattcagtttgtgtaatgaaggctctgacactcttgaagaagctatgccggtgcttgcaggtcacatggctgtcttcacatttcatccagccccgtccttttggccctcaaaagtattttgagcctatcacagcaccagattcccctgttgggtggagctgggggcccacctcttccatgtctccattgttatttatccttcacgtaagctggggctcttaggccccctagaacagtatgtgtgcactgaggaagggaccctaatgaccagagtccttctgaaggtcttggtgacaggatggcaggccaggagctgggggtggggtggctaccatagtgagatgcctcctcctctacctggatggatgataagtctgtgtgaatacactgagtcccactttgcccgaggaccctgtgttctgtggttggcgaatgcagtgtgtcctcacacagcacttcgtgcttgcaatataaaaccagcccgagcctgggcgttccgaggaaggcgggcccccagccaacagccagcaagcataccacttcccatctcaggccatgggagtatatagccaaccagcctagaaagcttagtgagttctggctgccataattgagtagcatagactgggtggcttgtaaagaaatgccttgctcgcagttctggaggctggaagtctgagatgaggctgccagcatggtcaggttctggtgacggccaggcagcagaccgtcagcttcttcccacatcctcatatggcagagagagggccagagcactgactagactcccttgtgtaaaggcactgatcccattcatgacccagtcatttcctcacccagtcacttcccaagggctctacctcttaaggtcatcacctttaaggtgtgggatttgaactggaattagggggatggagggagacaaacattgagtccctaagggtccattgtactctgttgggaaatcattttatcagtcagaagtaactggtgaacagttgggagtccattttgtacaaagtgggtttttttaaatagtataatgtatccacattcataaatagtatgggctaatatcttcttatctaaaagctacaaaattagtggccccgtgtttggattggactagttttgtttttatgaattagttgccagtgttttatataaaaattgagacttctccttgctttggggatagggaagataaactatcccataaaaatcgttagccagggccgggcatggtggctcacgcctgtaatcccagcactttgggaggctgaggcgggcggatcacgaggtcgggagattgagaccatcctggccaacgtggtgaaaccccgtctctactaaaaatataaaaattagccgggtgtggtagcgcacacctgtagtcccagctacttgggaggctgaggcaggagaatcactttaacccaggaggcagaggttgcagtgggctgagattgctcacgccactgcactccagactggcgacagagtgagactccatctcaaaaaaaaaaaaaaaaactattagccaggcctggtgtctctcgcctgtactcccaggactctgggaggcctatgatggggcatcacttgagctcaagagtttgagaccagcctgggcagtctggcaaaaccgcatctctacaaaaaaatacaaaaactagctaggcgtggtggctcatgcctgtggtcgccactacttgggtgtctgaggtgggatcacttgagcccagaaggtcggtcaaggtgagccatgttcatgtcactgggctcctgtctcttatgaaaaggccagaagtagaagagccaagagcttggcaactctgccctgaacttacaaggccctatttctgtgtgttccttagatatccgccaggcatcgtgggtgtggctccaggaggacttcctgcagccatggaagggatcatccctggaggcatcccagtgactcacaacctcccgacagtggcacatccttcccaagcgccctctcccaaccagcccacaaaacacggggacaatcgagagcaccccaacgagcaatagcagagaatgccagaaggtaatcactcagatacacttgggaccaagagacagtgaaaaatagatgaactaagagaaaaagaatcggatggtctttgtaactgattctggacatatgcatcattgatgttgcagtgttgaaactacaagagctagaaaactgaagatgtcgtctgcttacggaagcgctgaaagactaggatgtgatttattaacgaccaacttctgttattgtgtgttaagtttttcatctgtgcatcaaatcacaaaaagaataaatagagctttttcctttatcagtcccttgggcacagcaggtcctgaacaccctgctctacaatgttgcatcaagagttcaaacaacaaaataaaaaatattaagaggaaatccccatcctgtgacttgagtcccttaagtctacaggggctggtgacctctttttgctaataggaaaatcacattactacaaaatggggagaaaactgtttgcctgtggtagacacctgcacgcataggattgaagacagtacaggctgctgtacagagaagcgcctctcacatctgaactgcatactgagcgggcaagtcggttgtaagttcagtaaaaccctctgatgatgcaaaaaaaaaaaaaaaagtattaagtttcacaagctgtttgtactcaaatatattttctcagtttcagatcctctgctattttattgagtggaaagtcttgagctaaaagggttcaagaagaataatgttgcatttccttatgtctcaggaaacactttttatggtaacttgtcagattgtctatgaacaaacccacttttttagacattgataaagtcttcttttcttcacgtgatattttatacaagaacacttcagatgtattagatgtgactgattttaacaaatcctattagatttgtatcaactagttacatgttctattcatagtcttttgtgaatcattgcctttttgtttaaaaagatggcctattttgagcctttgtataggtacattcctgtttttgtgacaaaagaaaaactttaaaattgtcccaaacagaaaaataatggctatcagaagtatgttttgttttagtgtgagttaccgttactgtatttgtttattgtaaaggtggacatttagcgttcagtgcagttttcaataaaaagtaattaaaatttgttaagttctgaaattcaagtacatctcactaatgtaaatgttctctacttgagatgtttaaggcaattgcattgtcaattagccaatttccagctcttgttactacagggttccataaccagactcaagaccgctgacaattaattacctgtgataacaaaaagtttaattgaaaaatcaaaacctcacacaagtccatcattatcacgtcatgccatccttaagatgcaatggtgggttagtgctaaatcaattcaaaaaaaaacaaagttgctcaacttttagagttctgactttaatctaccccaaagcaaaatgacctggacctggttcaagggagggaagtgaaccttgaaactgttttgccaataacctaacaaacaaaatgatatttacaaagaagtgttgcaaatagtcccatgagttaagagcttgatttaatggatcttctttttaaatagaattaaacctttatactaaaagta

SEQ ID NO: 24 - DNA, 1965 bp, Homo sapiens
acccgcgcctgaccgcggcagctcccaccatggcggagaccaagctccagctgtttgtcaaggtgcagggcggactcagctgcggggagggtgtctgggaggaagcgcttttctgggctttgctttctgtggcaggctgtggggtgggcctcccagtaatgtctgagccccttcctgtgggtggctagggggactcaggcagccctacagaggctgagtaaagtgggacccagcgagtcacccagagaggggtcagtggccctggtcctgctcccagccttggctcctgggcccagcccagtcttctggaggagagctccttggtggggaggtaccaagcaggctgccaacagtggagcttacggtcggtgttccaggatggggggtgctgggccaggcagccccatcagctctcaggtcggggactggggtgggggactgatgtgctgttggccacagtgcccagtctcatgtgtgaatcactcagaaaacagcttgtgaggcccaccccacccctgcaaccagcttttggggactgagcccaggggcctggcctctgtccaggctctgacaagattccaggggccaagcctgccccaggcctcaaggctcccagcagctctgcccccctccccacgttctggggaccaagtcaagggccctcactgggcacttggaagtcgcgccgaccaagctggagccctggcgtccctccaatcccactggcagtgggaggcgggtcccgcccagcctggcggcaggatgcctgggtctgcttccagccctgaccccccacccccgctccacccacccaggcgagtgaggacggggagagcgtgggtcactgcccctcctgccagcggctcttcatggtcctgctcctcaagggcgtacctttcaccctcaccacggtggacacgcgcaggtgaggccccatcctgtggacccccgcctggcctcgcacactggtgggccggcctcctcccaccccgctgctgcccgcaggtccccggacgtgctgaaggacttcgcccccggctcgcagctgcccatcctgctctatgacagcgacgccaagacagacacgctgcagatcgaggactttctggaggagacgctggggccgcccgagtgagagccccggcagggtgggaggggaaaagaggggggcccagggaggacgcgcgcaagacagagcccaggaaggcgctgtgggggtactgtggggccgggacggggctgcccccagtctaatggagtcccaccccctcatcccgcagcttccccagcctggcgcctcgttacagggagtccaacaccgccggcaacgacgttttccacaagttctccgcgttcatcaagaacccggtgcccgcgcaggacgaaggtgaagcggggtcagggggtcgggtgcccaggcgggagggcgccctgggcctggtcctcaccgcgccgcctgccccctagccctgtaccagcagctgctgcgcgccctcgccaggctggacagctacctgcgcgcgcccctggagcacgagctggcgggggagccgcagctgcgcgagtcccgccgccgcttcctggacggcgacaggctcacgctggccgactgcagcctcctgcccaagctgcacatcgtcgacgtgagcacggaaggtgggcgggcgggagggtgaccgcggcgcgcctgggggacggcaggtcctgaccgcgccccgcgatcctgcccgcagacggtgtgcgcgcacttccgccaggcgcccatccccgcggagctgcgcggcgtacgccgctacctggacagcgcgatgcaggagaaagagttcaaatacacgtgtccgcacagcgccgagatcctggcggcctaccggcccgccgtgcacccccgctagcgccccaccccgcgtctgtcgcccaataaaggcatctttgtcgggagtgagggtgtcctgacatctgaagggc

SEQ ID NO: 25 - DNA, 17528 bp, Homo sapiens
atttcatgttatacttaataaaacaaaacatacctgtatacacacacattcactcacattgaagatgcaagatgaagaaagatacatgacattgaatgtacagtcaaagaaaaggagttctgcccaaacatctcaacttacatttaaaggtatggaatttaatttcattttttcaattggtgtgaattaacatggtagtttcccgtatcctgttccattgtgttattggactgtttcagtatttgggtgcttttctttctccgtctctgtatctctctcacctgtcctctctttcaatattaataatgatttaaaaataacaacctctcttaccatttaagaaacaccagtttccggcactatacagaatgttttatctatgttccttcatttaatcttacaaatttactatgagataatctctctctctcccatttatcaatgtggaactaacacttacttgtaatattttgtctgatataatttcttaaggacattctctgaggaaatatgcatactcaattaaaattaataatttcaaattagtgaatatttgctgccattcacctccttatcattcatagaatatggtgttttaatgctattttttttttttgagacggagtttcactgttgttgcccaggctggagtgcaatggcatgatctcggctcactgcaacctctgcctcccaggttcaagcaattctcctgcctcagcctcctgagtagctgagattataggtgcccgccaccatgcctggctaattttttgcgtttttagtagagatggggttttaccatgttggccaggctggtcttgaactcctgacctcaggtgatccacccacctgagtcttccaaagtgttgggattataggcatgagccaccgcgcccagcctttaatactaatttttaattcaacttctcaaaaactttatgcttttcaccaagttgactcaaaataaagtttatacaccagcaatcaacattttaatttgctacttcaagcataccctccatacacaatgcaattccatcatgccaccttaatgtgatttggcaaaagagataagcagaaattaaagacacaaataatcacagttatagagactgtctgttctgttctgttgctttctaaatatttctcttttaataacttcacccatgaaaattttacttatctcttgagtccttccacaagtatcatccatcagtgattcatcttagagttacatacgtgctatgtataagaaatttattgcctcttccatgtgaatttttagattcccatattttcaagtctttacttcctacactcaatttttatttcatttttggaaattagagatattaaacctgaaagactacaacatgtagtgacttctctgcagacttttttccacactctgttcataaatgtctctctgaagcaaaaatgtgcagattttcggctcccagatatttaagtgacacatactaatatttatgtcttgtacctttagctaatatttattaaagcttgaggtaagacgtattttatgtgaattagattgacaatgtgagccttggggttatgatgttcattcatttaacttaattttgtgatgacatatttgtaaatcttttctcatatattgaaaaacctttgttgccagtgatagtaagaaattacataattgctctatcccactatacatatgtagtagtttcagaatcactatagaaataatattataataatagttacttaaaacagattaaaatgttttgcggttttaaaaaatccttaagatatattccattgagcatgcacagttaaatgttttaaaatcactttaagtaattcctctctctatagtgaagacactaacaatacctagttagattccttttcttcattttttatggattttttttcatttttgtttaacttactttatagtagcataaaacatttacatattttcagtcaaacttatataatgaggggccaagtgtggtggctcatgccattaatcccagcactttggaaggccgaggcaggatgatcgcttgaggccaggagttcaagacctgcctgggcaacaaatcaagacccccatctctacaaacaatagagataaaaaaattaatcagtcatggtggcacatgcctgtagtcctagctacacagggtgctcaggagggaggatctctgagcccaggagctcaaggttacaaagagctctaatggtgccactgcactccaacctgagcaacagagcgagaccctgtctcaaataaataaataagaatttaaaaagtttaaaaaattactttcagagaaatccaccttgcataaatccagcacccttcataaaatttaccattttgtatttctatatttccagtgtttacttagctattctcactcttttgttctttcagataactttataaaaaattattcaggctcactcaccacaaacaacaacaaataaaacaacccgatgtagcttttacgtctaaattacttcctagtctgtcattaagcttagggagaatttatatttttgacacatagttttcttatccaagcacatgatcaaattaatgttactcagttttcggttagttttgttttgttttgtttgtattgggttgggacacttgtcgagtttctgtctagttttctttttgtttgttttttttggttaactatccgtgagtaatgaatttctttcatctatgttttcacagtggttactggattatacagggcactgattttagtatgttatttttataaatgcagctactattttttgtttctggaattaacggtagtttttcaattgattcttttattttaccaaatctgcactcacattaccttcaaataattttaccttctttttctaatatttctacctgtaattagaatatttttcttcattgaattatatattacctcttcgtattaaaaagtagtggagatttgagctatctttctttttctggacttaagcagaaaaccttctttcagttttctcaattgaataagatgttagcttcattagacataaaactattatgttgaacaagtatctattaatttctgttttttaacataaagatataagattttatcaatttcattttttacatctattgagatgatgatagatttttttccttagctttattaatataatattaatatggatttcctcctattgaataatctttatattcctagaataaaccaatcatggttataatatattttggttgctgataatgtatttaccatttttgtacagacattcataagactgattttggttttccattttattatttctggttttgggtggttaaaaggcttgtgttttaacctttataagttaaattaaaccatttccttataggagaaaacacaggataatgaaagttttactttctccattattcagcatcttttaaaatttttttttacttttatttttattttattattatttttttgagatggagtctcgctctgtcgcccaggctggagtgcagtggcgcgatctcagctcactacaacctgtagtgcttaggagaaataattcagtctgagttgaatttcaaccaccttccacaactttttttcctaatgttttctgataattattttttaagttttaaaataaatatatgacttttttaagacacatgcttgatttcttggaatttattgcttatcaatattaatatatcaaaaattcaaaaataatctcagaaatgtggagtattcattaaatgaattctgataaaattattttaatatctttgacaatgttatgataagagaaaccctgcgaactatttatctaaaatatcattctatagggttcatcatgtgctttcttgacagggcttgacagcgtcaaatgtagtttctctattttctcaggtttaaagagtatttagaatataaatttcagcattaataattcaatttattgactgaacaataagaataatttcggttacaatagaggattcttatcaattattatgatagatttacataaattatctttgataaggacaaaatgtttcacaaagtatagatattcacttattcagtataacataattattcatgtaatttcgtaagtcagtgcccagcagacctaaatcctctggatgagactctctactgtctgtccaatgatagcagtttcttgaataataatcattgaacaagcactcttatcttaaacctgacagtgtaagtctatgaaaaataaaacagttcttaaaagtttagcatttaataagaagatgaaatattattcatgacttacaaaggattttagggtttttttgattaaaatagcaggatacctaaagccatatttagttctgattcatccttagtaaataaaaaaggctcaaaggacttgtaaatgttatattaatgattaatcagaaagtgtttatgtggatacacatgtattatctgtaaatgcatgtgcatgttcatgagtgcgtgtgtctccgcaatggttggaaaattattcagtgcatagagtaaaattctttctacaaattaataatgttaaatattagcaatttcttcagatttgatatgacacgtatcatagcttctgaccatccagagtgttatcattgttaaataaatgtatatatttttctatttacttagccttcatgcttttgattgcctaatatcttttgaaaccaaaactaatattttatacaatcctattattacaattgctattgtattacttcctggaagcatacttttctaaactaattcatgtgattaatgtctcagattattcagtgacgttgcactggtataaaatcttactgggaatatctggaaccgtgaatggtattctcactttgactttgatctccttgatcctgttgggtaagtttagaagatcttaattaaataaaaatatgaaagatgtttacttgtctcttataaatctttttataattattcattcattcttcactacattaaccaagattgaattagaagctactgcatgtaaagctctattagtacactccacagtgctatatttaatatgcagtcaaatcaggtaagtatcttgccctcaagtggcatacagtctaatacggagaaaggagtgtatgtgtagagtgtgtgtgtgtgtgtgtgtgtgtgtgtgtgtatgtgtgtgtatgtgtggtatttgaaacagtttttctgtgtttcttggatactttaatagataaaattttactgttttgcttaaatattttaatacattttatctaaggttgcatttagtttgcttttccttttgtccagcaaatattcaccgagcagctacaatactccaaatattacaaattccccaaaatttttaagaaaagaatagtcagggtgaggaatgtgatattctagtgggagaagcaggtactaagtaattatggtacaatgttctgactacagtgttggaggctgcagaaaaacattaagaaaggatgaaaagagcctatatacttcccagagcagaaacttggctttatttattattgtattaccagttcgtaggaatgcctggcatagaatagattctcaccaaatatgtgttgtataaatgaattgattgtataatattttgaattctttccatcagtagacatgaaaattttaaaaagatcctagtgaccgtttcaattatttcttgttccaatcatcggaatcattccattgaatgtgtccctgaaacattccatagagaagatatttacctaaccttaaaatagtcctgtattcaagtttctcagggagtattgctaaaatgccaaaaaggaagttgttcaaatgccactcagtatgaggacactggagatctaaaagtgaataatggcacaagaagaaatataagtaataaggacctttgtgcttcgagatctgcagaccagacaggtatgtctcaaggctttggcttatcctagttttaatcttttggactctctaaatgtgaagtatttttgaacaggtatgcaatagattaaagtaacaagtaaaagtttggtataagtctacttttcattcaaaactcgatttaggtatctttaaacttgttgcagtgggagaaaatggtaaaacaacacaagaaataggctctgccctccaggaatttaaaatccagttgatacatataaatatggaaagttagttgttattaaaaagcagtatgtaaatagccattcttgtttgtcacttatttattcttctttttctgaaatacagactggataaaagtcaatattttaaaaattattcattatgattttaagcttagacttttaagcttagaaattccagtcatacagaattttgaaaacattaccttctatttttaaatgtttaactttttttttttttttttttttttttgagcaacaaggctgtttatttcacctgggtgcaggcgggctgagtccgaaaagaagagtcagcgaaggggagataggggtgaggccgttttataggatttgggtaggtaaaggaaaattacagtcgaagagggtaattctctggcaggcaggagtgggggtcacaaggtgctcagtgggggagctttttgagccacgatgagccaggagaaggactttcacaaggtaatgccatcagttaaggcaaggactggccattttcacttcttttatggtggaatgtcatcagttaagacaggaacaagccattttcacttcttttgtgattcttcagttacttcaggccatctgggcgtatatacgttcaggtcacaggggatgcgatggcttagcttgggctcagaggcctgacagtcctgccttcttacagtaataagaaaaataacataaaatagtattgaagtgttggggcagcgaaaaaaaaatttgggtgcggggggtagcatggagagataatgggcgatgtttctcagggcttcttcgagcgggattaggtgtggcgtgggaacctagagtgggagaggtcaacttgcaggaggattttgtggtaaggggtgatattgtggggttgttggaaggagcatttgttgtatagaatgattggtgatggcctggatacggttttggatgaattgagaaactaaacggcagatacaaggtccgaataaaagaaggagaaaaataggtattaaaggactaagaattgggaggacccagtacatccaattagagagtgtccaagggcgttcagcataattacttgcttggttggcaagtttttggaccctatccttgagttttcttatgttgtcatacaccaggccagattgatttaggtaaaaacaacactcttcatttaagaatatacagagtcctcctttttcagcagtgagtaagtcaaggcctcggtggttttggaggataactgcagctaaagagtcaacttgggcctggaggactgataaagtttgtgatatgtctgtgatgctagcagagaagacactagagaggctatggaaggtcgtgacagaggttgaaatgcctcctattccagtaccgagagcaatagtggaggcagaaagtcctaaaccaacaagcaagggaattagtggaataactcttttttgtcgtgttggtgtcatgaggggaacagggagctcttcggtcctatttgcaaattgaattttgggagtaaggaaaactagtgtgcatgtacctgtccaattagcaggtagacacatggaggtagaggatccacagaggaagaagagaccttgtgcgaggcaaaactggagatgcaaagtaaaaagatgaggagtgctgaaaggggtgtcttgtacccagactcctggggatccagctagggcggcagccaccagaggttgtaatggggactggtggggtaactgcgtagagggggaggttcgattttcatggtatatgagaaaatgttgagtgtctatgagctacctttcactgttattttcggggctgggtataagtaaacaagaagagggcctgggaggagggtctgatgagcaaggggaaggtagccgaggatggagtgaaatacagggtaagtgtcttcctaagcaataattactgctaatatttttaagtttgccagtattgatagagggcttttctgtaatacggagctggaaggctccaattgtttcggtgacatgcatagctggactttggagatgaagagtaaaggaacatggagaaggtgaagggttactaggggaattccagtgggtctttgccgagagatacataaaggagtggccacaggaataggaatagtagtttgtgttgtgagaggtccaaatatggggggagtagagttgatataaggagaaaggttttttaagtaagtgtggaggagggcggcagcttgctgatatgaaatgtctggggaggtcttgctggacctgtctagaaagtaaatgagttcttcaggagggtaaaggtgagggctgttaaaggaagttcagaggtatagggagacagatgttgcccagtctacatgtaaggtgggggcagctgtgtaggcgctggaagaaagggaaatgcaaagccagcagttgttcaataaggagagattagaaatggctaggagagaataagtaacgttggtagtgtggtggagatagctggggagaggtagagggtgacataagaatgggaatgatcccttcattctattaggtctgtttgtccttaccctactttttgcaacagggctttacgaagttacccccactacttggaccgagccccaaaaactagtcatccctactatcttctgtctagtcatactcctattcaccattctcaactacttataaatgccctactcttgtttacactgccggtttacactgtttttccaagccatcacagctgatatctcttggtgctatccccaaaccgccagtcttaactccctcttagagtggataggtgatctttgctggcaggggaccctccaatacttccaccctgatgaagttctattctttacttttaagtttaactttttgatacttaactgatcattttgacatttgttttattgtatgagatgatatattatgactttccagataaatgtataattattataaaaggatttttttctaatctactagttcgtatttcctcctttatcatacgtgaaaattttatatattttatgttctacttattgacactgtcttcatttggcttatctgtctgttttacaggtatatttcccaaactaatagatattgtagctttacctcatattttattgtctccctatctgtaatgtctgtcactgtgttgggtatcattgcaatgacaccttagaaaaattaaggcggctttggtaggtaaacatggaatcatgtacatggcagtaaacattaattaaagtaggtataaatactgtatattgagctacaatatatttatttcctattccttttcttagctgaggtacaattcaaaatttgaacctttaaaagtaaacaatttcatgatgtttagaaccttcaaacgttgtgaactaccatgtttatctagttgaaaaacttttcccaaaaataaatcccttacatacccaacaagcaaatcactctccattctctctccccttagcctctgacaactacaaatcttctttcggtctatatggatttacctattctggattttcatggaatagaatcacacaatatttggccttgggcttctttcacttagcataatgtttttaaagttcatccacattttattcctttttatgggtgaataatagtccattgtgcatgtatatctataaatatagatacatatatacttatatgtatctctatatctataaatacatatatatttatatgtatctctatatctataaatatttatagttttatgtatatctgtaaatatagatatgcacaatgtttgtgtgtgcagagcttaaaggtcagccaaaggtgagatcttaggaccttttcaggtaatttctgagcatgcatccagctcagggcttgtgcctggccttccagattttcaggattatgtgggagctttccaaagtccttattcatgaaacagctcattccccggcttttcctctcaagcttttcagtcagtcctattgtttgttccaactgttataccttgcctcatgtgacaaaagctaacacattcaacttaacttttacaaacatcgtttggtagcctcaaggcagatatctaagtcttctttactggcagtgatatctactgctaaaacaattcaagagtccataggtgctctggatttcatagaaactcatgaaaaacaaactcagttacatgttgtctgctaattctacaaataacacctcacctgacttgaatcaaaattactactgatagcaaggccacctctttgctaggccaaacaaaccacctacagccaggcccctgcttcagggtgagccctgagaacaagagagtttatatcggaccccaaaagacaagtgggtcccaggttggataatctccggtaaattggtgaaacaattacaatacttactagggttacatgacaacagtgccagtctactccttagcttctggaggcaatctttccttctgcacctccctctgtatccatgaacggcaggatcctgctcccacatagggatatggtgagcatgcaagcaggcctcttctagtagacatccactcttttaccatattaattgaggttgagtcttcaaaaaataaacaactttgactggctctgactgacttttagacatgaatgcccaaattcctcttattccaggaagcactcataagttaaagtgatttttctgggggggtgaatagctttgaggaagggtaaattaaagaggcaattccctgctcaactattaaaattggccccattttgctaaaagatgctttcatcccggttgtcccccaagactattcctttgttcatccttgaaatggaccttctcagtcagcacgtgatctcatggaaagcttttacactattggcgggcaccacgtagtggaaaacagtcaatcttccctgccagtgtgagtggtaaatgctccaagataccaaccaaggcaaagaactgcaggattgtggtctgttatagctgactttgtcaaaggaattctattttttaccatgttgccttttaacttcctggtgtggcctatgtttaaagccactactagagagtgaaggctaactatagactacagggagttaagaaaaattattccttttattagagcacctctattggataattgctttaatgaatgaccttcaaaacatgggtaaatagtttgggtacagacttagctaacatgttttatttagtacacatttttcaggagaatcaatcacaatttgccttcacatttacttggttgctgctatgaactgaattgtgccctccccctaatttatatattaaaactttaattcccaaatgtgatgggatttggagacggggtctttagaaagtaattagatttagatgaggccatgtggatgggccttactcagtttggggtgccacagctaattaccataaactaggttgcttatgaacaacagatatttattcctcacagttctaaagactggaagactgagatcatggtgccagcgtggttgggttctggtgagggccctcttctctgttgcagactgccagcttctcattgtaatctctcatggcagatcgcagaatgactcaagttatctcaggactcttacgagtactaatcccattctgatcatctgttcttagctcccaaatgcccacctcctaataccatcatattgggaggcaggatttcagcatatgtattttggggtatgcaaacattcagttcataaagttttacctctgaattcccaaaattcatgtcgttctaacatgtcaaatggaaaagacaacacaccaaaagagaaagatatcagataggagtattatattcagaacatagaaagaacacttataactcaaaaacacaacccagtttaaaaatgaacatttaaaaatggatagacatttctccaaaaaacactatacaaaaggccaataagcacttgaagagatgtttaatatgatcattcattagggaaatatgaaatcaaaaccagggtggaaagccactgcacaccctccaggatggctataatcacacaaaaagagcaagtgttggtgaggatgtggagaaattgctcacatatttctggtagaaatgtaaaattttatagtactgtggaaaacagtttgacagttcctcaaattatcacatgacccaacattcaacttttaggtatatatttaataaaatggaagacatatgtccttacaaaaatttgtacatgaatgttcattgtaacaatattcataatagccaaagaatggaagcagctcagatgtccatcagctgatgaagagataaacaaaatgcactacatacatgttatgaaatattcttacaaccataaaatagaatgtagtactgatacatgctacaacttttatgaaccttgaaaacattgtgctgaatgaatgaaaaagccagatacaaaaggccacatattgtatgattccatttatatgaaaggtccatcatagttaaatccacagtgacataaagcaggctagtggttgccagcgctgggggagtagaagatgaatagtgactacttagtgtttatatgtaatgaaaatgttctagaatgagatagtagtgatagttgtacaacattgtgggtgtattaaaagccacagcacttgcactttaaaatggctaaaatggtgaattttatgttacgtgaagaaaaataatcacgataaaaaataaataaaaagagacagattgtaatgggccataagttaaaatagttatattggcctttacatatatttttatatatatctcactttttctcaatactatgccaaaaatctcgatattttccatttaatttaatttaccttaatattaagctaggaaaatcaaagaacttcataatatttcagttattaagaggttgaaaataaagaagttgaaaataaattgttattcttgacataatttaatcatttaatcattaattaatattaagagggagaaagggatacacatacaaaactacaaggagagcgattttaaaactttgtgtggtttttacttgcatttcctgtaatgatcagtgatgttaacgacgatgaggtactaactcacaccagtcagaatggctattattaaaaagtcaaagaataacgtgctggtgagggtgtggagaaaaaggaatgcttatacactggtggtggaagcgtaaatttgttcagccgttatgggagactgtgtggcaattcctcaaagacctaaaggcagaaatacccttcaaccccgcaatcccattactgggtatatacccaaaggaacgtaaatcattctattataaagacacatgcatgtgtatgttcattgcagcactattcgctatagaaaaacatggaatcaacctaaatgcacatcaatagtagactggataaagaaaatgtggtacatataccataccattccataccatggaatactatgaagccataaaaatgaatgagatcatgttctttgcagaaacatggatggagctggaggctattatccttagcaaactaatgcaggaacagaaagccaaacattgcatgttctcacttacaagtgggagctaaatgatgagaacacatggacacatagagggaaaaaacacacactggggcctacttgagggtggagggtgggaggagggagaggatcagaacaaataactaatgggtactgggtgctacttggatgttgaaataatctctacatcaaacccccatgacacaaatttacctatgtaacaaacctgcacgtatacccctgaacttaaaagttaaaaaaaacctttgtgtggataaattctaagtgatacaaattatattttatctaatctctcaaatagctattttattttgttcatgctattttagtcaatataatagatcttgcatcaaaaatcccattatgtctaggttttgcttcatctcattaaattaattgtcttaattcccaaggaccattatttgtgttttggccatcttttgtgtctggacaatttgctataagtgattttattgtagctcaactcttatttatacaacatgtaagtattgttcttatggccaattttcagagatgcatatgtaatttaatttcattttgttttctacatttctctgtagtactatgccaatcagaatggctcaaataccaagggaagtgttgttattggttctctaatgagatgaaaagctggagtgacagttatgtgtattgtttggaaagaaaatctcatctactaatcatacatgaccaacttgaaatggtaattggtctagtatcagggttatggcatctttgcagtaaaaaatggctttcctcaaatatctttccatctttgcattaaatcatcatttaccttgattatcgagttttgggcaccctcttaaattttgtattccaagtgagtgcctcacttctcatgctagatctggcccaaattcatatattcaacttgcaattgtgtgtgtgtgtgtgtaacatatatatgatataatgtgtgtataagtaagatatgaattgattaccataagaatccctatgcagagtgcttttttgcaataacatttaaaatattcagtgtgtctgaattgctaaaatattttgttcatttagtccctcgtccacattttaggcttttatacagaaaaacctaagacaattaaactacgtatggattgggcttaactttacctccttgaaaatgacatggacttgggtggatggttctccaatagattcaaagatgtgagtctttcttaaaaggcaatctgatttattgtttattgtagaatatgtctcctccaggttcaccaaattcaactctgaaatagttactggtactacagaattcaaaagaatgaaaattaatttagtatttacaggagtaatgatggatagtttgatttgacttttaaagaaaaaggatttgaaaatggtggtttatgattttaaaatttctcacactttatatagaaaagtagattgaatgaatgcagtctcttatttttaaaggtctcaatgttttctttagccatcttcagtaataaaataaaaccaatgtgcattttttgtgttatgtgattatcatagtgtcaaaatacaaatggtatatacaacatagaacaagattatccaaaagtctctgaacaaatgcatggaattattgattttaaaagttctgtcaacatttttgtgcgcattattttataataaaatatttaattaaaaatataaacagtaaaacagataaattcaaaatcctattcctatgttagcaggcaagataatggtccccaaagatgtccacattctaattccaaaatgctgtgaatgtgttattttatatggcaaaagagcctttgcaggtatgattaaatgaggaatctcgagatagggatattatcctggattatctgggtggccccaattaaatcacaagggtccttagaagagggaggaagcagaattagagtcatattgggagatatgaagtggaacacagagattcatatgatgtgaaatcacgtctgtgagccaaggcacgcaggtggcctcggattcctgcctagtacatccagaaggtgactctgcagacgttttgatcttagccctgtagggcaatcttgggcttctgatactcataggtgtaagataataaattagccttgttttaggccactacatttgtgataatttgtcatagtagtgatagaaaaatagtacattatagtaaccaacttaatggtgttattgtattattttccccttatttctattcatcattaaatattacatattttctatctgactgcactaaatcaatataaaaagtgaataaaaaacattatttggaatgcagtgtaaaattatggatgtgtgtcatctgagagcagagttgtgtcactgaacgtcatgaagttgcccaacttggttttgtcttcattccaaatccattcatcactacccgttagggttgagttttaagtctagatcatgcttggagatttttgtccataatatgttcaatacaaaatttaaaactaaactcggacaaagtgtattttctaatatgaaaattcagtacttacttgcccttatcaatttggaagctttgaagatcatgtgcaccttttccaagattctttcttgaactttttccacaggtcaaacaaatttatcagaatgtatcactaacactacattattttatacataaatttgttaatatttttaatatgttacattataagtaaataatgcaataaatatgcaatttattatttaggtcatgcacagttcgttttgtgtattgagttctttacaaacctcaattcatataactgctaaacaatatcatgaagtattattatcgttcttatacaattagatataagaaggcaagagaggttgttaagtgaggtgtccacatggagttaatcttatttttaatctaactgaactacatggggcaagaggaggaatactagaatgggaatgtggagggaaatttattcttacttctgttagttgcagactctctggcaactcttgaccaaccacagctaacaaggctaagttacagttactgtaatcgttagtgaatccaagtatgtaaaaatgctttgagattttgaattacttttttatttaaaagaggatattagcagaagacacaaatggatgtcttcagctacagtgattaacaaagtatttattctctcttccctagattcttcataaagggaccagctaaagaaaacagctgtgctgccattaaggaaagcaaaattttctctgaaacctgcagcagtgttttcaaatggatttgtcagtattagagtttgacaaaattcacagtgaaataatcaatgatcactatttttggcctattagtttctaatattaatctccaggtgtaagattttaaagtgcaattaaatgccaaaatctcttctcccttctccctccatcatcgacactggtctagcctcagagtaacccctgttaacaaactaaaatgtacacttcaaaatttttacgtgatagtataaaccaatgtgacttcatgtgatcatatccaggatttttattcgtcgcttattttatgccaaatgtgatcaaattatgcctgtttttctgtatcttgcgttttaaattcttaataaggtcctaaacaaaatttcttatatttctaatggttgaattataatgtgggtttatacattttttacccttttgtcaaagagaattaactttgtttccaggcttttgctactcttcactcagctacaataaacatcctgaatgttttcttaaa

SEQ ID NO: 26 - DNA, 24085 bp, Homo sapiens
gcagccagagctcagcagggccctggagagatggccacggtcccagcaccggggaggactggagagcgcgcgctgccaccgccccatgtctcagccaggtgatgtccccctgcctccctcccggcccctgtggaccagccagagggctgggagtgaaagtcacagagaagactttcagctctgactcagttcccccagcagtttctgcctgaactcccatcccccaactttgtcttagaattcccctagggaggggttgggcccagctctcatggctcctggctggaggaaaaagcggtccccagtcccaggtcagctctccttcccaacccattcaggggaggctagggactgctgtgggatgaggggcttccctgggctctgtgtgctgggcccccaacccggagaggtggagaagggatgggtggatagcctgggtgcccggagagggtacgggatatggggtgggacaggcgggagccccctcctgacctctgtggagtggggcccatataccgggggaggcagccctgtgttgcgtgctcatcaggaggcttgtggagtaagtggggacagaagggtccccttggagagccatctatgaagtgaagttgctgcgaggcctctgggagccccaggctggaggcagagccctgggtttgagtctgggtttgtccctcccttggctgcatgactggacaggtcagaagcatctccggacattggggatgggaccctatctttggggctgcctggagctcatgctctctcctctcctgggggccgaagcctcccactcttaactgtgtttgtagcacctcgggggagggaggtggagtgaggagctgagctatccccaagggtccccttccttcccccacagccagggtcccgcacccagctggagaagcccctgaagttaaatagcaagagacaagcactgtgtatgggagcaggggggtggcaggtggaggtggccagagaggacgaggggacataggccccattgagttcagaggtcaagttggatgaaccatgggctcccgagctcctgctttaccaccctgccccagccaccatatacccctgatggcagcaggggccccgaactgcacctgaccaggttcaaatcccagctctatgcccttctcgcctgggtgagaggttgacccgtttcttagtctcctcatttggcaaaaaggaggcatactagagcctcctcatggggctgtagggagggctaaaagctgaactacccccgagcgctcagggcaggcagtgtaggcagagagagagcaggcaccagtccctgtccccagcagcatctctctgaaaatcagatggctggggtcagccgctccgggcttcagttctggcatggatcaaatggggcagcaagacccaccttgcagggctgtggtggggacgtaggcatccgtgggtgtgaccagtttcagagtcatgaacgacagggcacgtgtgggtgtgcctgaggacccaggagggggtgctcaaactcgaggtcctgggctccacttgctgtcacccgaggctgggcttctcctcaccgtgcaaccttaagtgggttccttggcctccctgaggcacagcttccccattgcagaatgagggtgcagcctcagtgactgccaggcgctccctcagctctgtgcccctctggcacccccacaccatcctcccgtggactctgccctctccgagcatcgctgcacctctgagctccaggcggcgggaagcagactccagatggcgctttctcctcctgcccggctgcctctaggctgggcctgtggtttacccctaaccttcctttgaccttgcacccctttgtccctcagcaccttcctcacacactggggctctctgcagttcctgtcctgggcatggggtcatcctgaggctgggcccgacctggggtgacacccacacaaaacattgatggtccccttgccccagggccaggttggcatgattgagcgtgaaggggcataggggctatgggagtcccctggttgggctatgcactctttggggtcccaaccctgtgccctctgctattgggggatcccaagaaagaggtgagcagcccccaccctggggagctcaccctcctgtggagacggtaggccaggcaaaggcgagcccatggtaccccgaataagcacctgccagtctgtctgtgagctgctgggtcctgactcccaggacagagagggtggcagccttacctctgggaccagtgtctggcagggtgggacagcatgagagagtgagcctggagccctagctccacctcttactgtgtttatgaccctgggcaagttaggggcttggagccttagtttcctcatctgtagaatgggataataaagccattgggcagcttagacgagctggcatatgtgaggcacttggccccaggcctagcatagagtatgtgctcagtacacagaacgagtattattagttcaccagtgcatatttactgtcgtgtgagctgtcgtggtgggaagatgcgtctggggagttccaggaggggaggatccctgcctgggcactgggcagtctgccctgactcagattccagaaaggcctcttatccactgcatgaccttaggcaacgcacttcacctctgtgtgcctccgtttcctcattggaaaatggggataataagagtatccccgccagaggccctgattgctgcatttaaagagttttaaatggagcctggcttacagtaacctgtcagccgatggttttggtgtgactaagggggtggcagagcggcgtggagttgggttctgatcccagctctgtgctgggctcctgatgtaaccttcagcaagtctttcccacttcgggacctcagtgttctcaaatgtagaacaagggactgtgcttgctcagagagcctttgcagctttgacagtgcgtgggcctctgactctcactcctgtgacatctgccttaggagatggaacccatggctcttggggccagggtgtgtgtccctgctccatgctggctctgatgtaagccacgagacaatccagggccacctaaagagctctgcttttttttttttgccgtactgaggcctctgaccacactcattcatttcactacatttattgagcaccgactgtgtgcccggccctgtgctcagcagtccctggagcgagtgtgctggtgggccagcccctggtcaacgccggccctgctgctgccagcctagagggaggagcaaggcgctcagaagaggaagccctcgccctccatcacggaaatcagggaaggcttcatggaaaaaggcatgagggcccgtttgaaatgggcttgaaggatggcaggatctgtaggggacccagggaaaggatagacttgggaaggacctttggagggtgagtgtcggtttcctggtcacctggagccactggcttgtgcaggcaggtaggtgcggtgtgtgtgtgctttggcctgggtacatgcacctgctcctgtgagggcagggtctggaagggtgggctgacctcattccggtcccagaaagcctcgaaaatgggaatttaggctttgattgcaacagggccactgcaggttcctgggcagggatgtgggtggttggaggcgggcttcagggaaggcaggtgagagcctgcagatggggtggtgccgttgtctgggctggaacggcacgaggctggcctggtgagggtggggaagagacaacaagtagtcactggagtgtcctgctgtctgaggagagtcctgactggctaggtatgggggcaaaggtcacctggaataggaagggtacagttgtcccagaactgaaagtcagacaggagaagagctggggatgagctgggtttttgccgggtccaggagcatcccctgtgagggggtcctgcagaccatcgggagggacgtggaggcttggggctgagctggagaaagaccctgggaagctgagggctggagccagtgagaggctcaagagagagaagggaaggggagtgagagctcgagtttggagccgctggagaagggggaacagcgggggaaatgcccaacgctcaggagccttggaagctctcgagatggaagagcaggagggagggaaggatgttccacctcctccacatctcttgactcacctgctcctctcccctctccccctgcccctctgactgaggctaccctcatctttccctggaagctccctcctcatctccctgcctccccctttgcctgctccaaacacctctcctggaagcagtccccttatcttcccgaagtgaccatgtgctcactttctcattcccctccgcacacccagcccctgcagagggtgggggcagctacttttctttcccatttccgctgcgacagttgtggtcttgcctcacgggagcttccacggttggctagaggttccctgagaagcaagtctttgtctcaaaaaaaaaaagtaaataaataaagcactggccagtggccagtgcataataggcactccgggaaaacttttgagcctccctctgacagggctggcttagagatttcatgtctctttcctccctggggtataatctgggtgaccaacctggccctgcctccagggagcttccaggcaggtaggggagtacgagtgtggacaaggtcctccgtaaaggctactgcagccctctgtgcctcagtttcccctgtcctctagggctcttcagtgtttgggtcagagctcctatctgcttttctgcttttccgagttcgcgtcctgatgccttcacaccattgcctcagctccctcgagggacagtgaggggcagaggcaggggctagcctcagagccctctggaagcccctctacctgctgactttagctctgtctatatttattccatcacttgtttgttcaagaattttttttggccagatgcctactatgtgccaggcactgttctaggaattgtggacctagcaatgaacaaaacacaaaaatacctgtccttagtgagcttacgtgactctgtgtgtgtttgtgaagagagatagaggaaaacatgaatcagtcaataaacgatgaataaataatgctatgatgaaaatgtaggggggtggtgagtaacaaagggtgcttcttttatttttttctttgagacagagtcttactctgtcgtccaggctggagtgcagtggtgccatctcggttcactgcaaactccgcctccaggttcaagcaattctcctgtcttagactcccgagtagctgggactacaggcacccaccaccttgcccggctaatttttgtatttttagtagagacagggtttcaccatgttggtcaggctggtctcaaactcttgacctcaggtgattcgtctgcctcgacctcccaaagtgctgggattacaggcatgagccacacgcctggccacgacgggtgcttctttatgtagtctagtcaaagaagacctctcaaaggaggctgcagttgagcagaaacttgaaggaagggtgtgagcatgtgtagggtggtgggattagcaggtgcaaaggccctggggctggactgagctggcaccgaggagtgcagaccatgcacactgagggggcgggcccagcctgcctctaggggcagcgaggcctgggatgtgtatttacgtgtgctctctctttctcctctcccaccagggcttccttcctcggctccaccctgtggatgtaatggcggcccctgctctgtcctggcgtctgcccctcctcatcctcctcctgcccctggctacctcttgggcatctgcagcggtgaatggtgaggaccctgacatctgaacagctctgctttccctatggagagatggctaaggccctgctaaagcctcttcccagaaggggatggggccagagaccaggtgtccacctcctgcctcaccctctgtcctggacccctgccctggcatgcatgcatgaatgcgcgcacacacacacacacacacacacacacacacacacgcctctccaagccacaggcttgtgctactttctgtccctgccttgccttagtttgcctgtaggaacttgcaggctctggagctccatttcctcctctctgaagtgggtccatgaatcccttctccgcttgccagagttacccacctcctcctctggcaggtgtgggtgccaggtgcaggggcagtgggcgtgtcttgggggggctgtgggcacctacagtcagcactcacacctcatcttgcccggcaggcacttcccagttcacatgcttctacaactcgagagccaacatctcctgtgtctggagccaagatggggctctgcaggacacttcctgccaagtccatgcctggccggacagacggtgagtccactggccacactgcagaatcttaggatggtgggatctcatattctggatcctatgcactggactccaaggagtcaacgtttacagaatcttggactaatgggacccacagactttttgaatcacaggagttggggcccaggcctggaatcaagggatcgtttaagagaatttgggagtcagctatttagacttctagaacctgggtggagtccaggctgcagtggaggggctggggatgaactggacagggtagtttggggacactgagctgcaagcctgctatgccaaggctggactccactctagaggcaagcagagaggaagtggggagaaaggagggtccccaagctttttggataagctcggattttgagagaccctgtaggcagctgtggggacagggaacctgggagtggtttgggtgcctggtggatgggagagagatgtcactgtgatgtaaacatccaggcggccagtgagtgagggactgaccccaggtaggcttgatggggtcagggagaagaggaagaccacagagaggtggctgggcccaggtggattccatagggtgtggggtgggggaaaatggggagggagatggaggggtaaggcaggttcgggccctggcttctgggtgggtggtgattccacacggctctgaaggcctaattaaggatctatcttcatcctaagcctcatggagctttggagggctctaggtggggaggactgcctgtcttgaagtggtttgtgtttctagatcactccagctgccgtgggaccaggctgggatgagggagcaggacaaggtgcccatgagggaggaatgccatggagccagtgggggaggcagtgcccctcacagtggttggcacaggggccccagcctggccttgctgcctggtgccatcctggcagcagagagatctgagaagagtcccttgggccagctgtgtgggtccttcctgttcttctaaagagggtcttttgccatgaaaggcggtggaaccaaacctgtgagctgctccccgtgagtcaagcatcctgggcctgcaacctgatcctcggagccccagatgtgagtagcccacccagggagagagtgcagggagagggtggtctcccagctccgggctgcgatctcagggtgggccggatgccaggggaagagctgaggcccaatggctggggctgtggctaagcaggatgcccagcgctgagcaagaggcagagaaaaacaggtgacaccccagggagtggactcaggcctgccccagggccgacggaccctctgtatgtgaggcatctgccattctgcctctgctcctgctgtctcccctgcgctttgtgggtcctgtgacacttgtgttccttatcaagtaagacagcactccagtaactgtaatgaccacacccagctcttcccgggggcttggcagtgcagtgcagtgtggggggtgaagggtgtagactctggagctggatgctccagccctggctcaccagctgggtgacattgggcaacccctgtgccccagtctccccttctgtaaaatgggcataataatggcacctaccttgttgggtcaaggcccaacaagggccttgtttttcaggccctccccagcctgaaggtgggacctcaccagggacccgcctccttctgcccaggctgctcgggccaaggggcacctgcaggccagtgccaagctgtcccctgcacccccgtggcttcccatccccctgtgctcattggtgcctaaagtccagagggggccgaggcagctggggccagtgagtcagtgctgcctcgagcgtgccaggctgtggtagtgcctgggcttggtcccgctctgagattggagtgggcactggagcaggaggaggccagacagtgggagcagacacccctgagcttgtgggggcagtagagatgcctgggtcctggcttgggcagctgcagctgccccaggagagctcctggctacctcggaaggggcaggggtcccgcttgtccccgactcacactggatccacagagtgcgtagccccgactgtgcctccaggatcagatcgggtgccagaagcaggggagaggccaagcagtgggaacagacagctctgagcctgcggaggcaaggggggatcttcccagaccctgagagtgcagggatgcctgggtccacagccacaacttgggtagctgcagctgtgcccgggagggtgggtctcctgcgtgctccctgcttgcaagatcacctggaggcttgggtttggaccagggcccctgagagtgcagggacacctggctctgtggccacgacttgggtggctgcagctgcgcccaggagagcggggctcttgcctgatcccagcccccaacagcaccaggaggcctgggtccacagccaagacttaggcagctgcagccctgcctgggagggcagggctcctacctgctccgtggagcaggagaccccagctacgcctcccggctgcagccagagttttagcagcggccactccggatgggcagctgcggccttcacctacagccccatgggtcaacatcagcactgtccccttcttaccaatgaagacactgaggctcagagaggtatggtctctgcccaaggtcacacagccaggaagtacacagctgggattgaacccaggcctgcgggctcccagttcaggcttctcaccgttgcattaggctgcctcttgcagggcatatggccatgtccatatgagtgtacatcaaattattgtctgtcaaagcctcctgggcggcagcgggctccaaggacacccggaccacatcttccatcaggttatatgtcttcttgaggggcaggagagtgtgaagatggagtcacacagtgtagctgataaaatcacagcctctggaaccggatgctgttccccttgcagggagctctgtaggtggcctggtttctgatcctggctccaccatttcttagctgtgtgacctcaggcaagtccctaaggctctctgtgcttcagtctcctcagctgtagaatggaaatagtgacagtgcctgtgcccaagttgagagaattaaatgagacaatatatgtaaagtgctctcaagagtgcccggcacagtgtgagtgatcacgcgaatgtatgattggcaatatttttataacaataatagtaataataataataataataataataataataataataataatgagactactatcatcggggaaaatctagcccccatagcagctataagaaggctaggacagggtctatagggtggagaggaactggccagtttggggaattccaacgatcaggtttaaggtttgcccatagtgggtcttatgcagaccagagggacggtgcccaaggtcccggccctgaaatcagcatcctggaccccagatcctaagaggcctgcactagagcttcctcccgcagggctgccgggctgtagggttggcagctgcacagtggcaggatgccttaagctgctcactcggcagccctctgtcaggcatgacaagccaggactcggagatgcagtcaccctgtagggggacacagagggcctgggtttaaacttgggctcccctgctgttcatctgcatgacctggcgcaggtcccttgaccagcccaagcctcaggcttcccacccataccatgggatggatgctgtgtgcattgaggggctaaggcatctgagcagtgactgctcataggaaaatgctcaatacctggccattttcttccagaaaattcaaggcgtagggatggggagagataggggaggggagggcctttcacactaaaaaatgttaaacaggtatagttccagaactgtacctttgtgggggcttaccagcttgcatgcctcctgtaacagggagctcactccctctcaaggtagctcacttcattttagatcaagtgttggtaaactaccttgacccataggccatatccagcccactgcctgtgtttctaaataaagttttactggaacatggccctaatattcatttacatgttgcctacgtctgcttcatactacagtggcggagttgagtcatcgtgacagagaccatgtggccccataaagccaaaaatagttactatgtggccttttacagaaaacatttgctgcccctgccttgggtggcggggcatgtggagaggctgccatccttcccaggtcatcccggtggcctcccccttcccctgcctgaagctgctagaagtttcacccctgccctccttcccttgcagtctcagaaactgaccacagttgacatcgtcaccctgagggtgctgtgccgtgagggggtgcgatggagggtgatggccatccaggacttcaagccctttgagaaccgtgagtgaggaagccagggtggggctggggcagggctgggcacctccttccttccacctcctctgggatcttccctgctccagcctttctccccggcagcttccacacccacatctgatcacctcaccgcccgctgttctcgggatgacgtcctggctccttcctctggcattcaaggccgctcaggatccagccctgggcctcctccccggcactcctcctcttgaggcctatatttctgctacagccaaaggccaactctccaaacccaccttgcctatccctgcctctgagcccttgcacatgccgatcccactgcctggaaggccctttacacctggaaaattcccactcacgtttcgaggcttagttgaaagtcacttcctccaggaggccttcctagactcccctagccctttgtacctcctctttctgggaatgtatgtcctgggttgttactgcctgattgtaggtctgtctctttcactgggctgtgagcaccctgaaggcagagtctctgccacccctgtgtctccttgccacgcacccagcactaggtctcatcaggacagtggtctgggaaggtttgttgaatgcctgagcgactgcctgctgaccttgggggccatctccagggaagcagtggggtggaaagtgagagtcaggcctgaactggatgtgatctgactggcagaccatcgaaactttctgagcctgagttttggggagaatcggagtcacctacctaccaggcttgtaaggcatctttgaactgagacatagaaactgcttaccatgtagtcagcactcagcatctgcttatcacttatgtggttctatagagtcttagaagtatagaaactgagattcatttaacttcagaatcacagtgttataatcatcacacttaaaataaatgagatgatccatggaaagctctcaggtcaattgtaagtgcagagaaaagctgccgtgagtcattcatccagcagctactgaatcaagtgccaggtaatcttccaggtgccaaggacacagcagacaaccaagtccctgccctcaaggagctcacagtctgctgggggagacagaaaatgagtaaagaaaccaaaccatatatttcgtaggtcaggtgatgataagcactgggaataaaagtgaaacaggcaagggggatgcagagtggtgagtggtcagggaaggcttctctcaagaggtgatcattgagagaggcctggaggcagtgagggagcgggtcctggggctttgggtcggggggtaggggaggtggtagcatgtgccaggagggaggagtggcaggtacaaagtgggaggtggaggtcatggctgactgctctcccctaccccctgttgtctccagttcgcctgatggcccccatctccctccaagttgtccacgtggagacccacagatgcaacataagctgggaaatctcccaagcctcccactactttgaaagacacctggagttcgaggcccggacgctgtccccaggccacacctgggaggtgagaatgtggcccagtccgtacctgccttggttcctccttcctgtcctggtccatgtcctgtccctttttcattgtgtcgaggtcccctcagccccaggtggatggtgggtggctgagtccagtgctctttctgcactgcctggggctgcctccccgacttccacgtccttatctagcccccttaatcctggggatccagctggcagcaggttccaggctgacaccagggaaagattcagaaagccaggagataggcagctgcccagccccatgggctttcagaggccagggaagccaaccctccacgtgtcaaagcccatctgctccacatccgtgcgggcctgttgcttattcattcacttacactcatttcttcattcactcaactgctcactcaataaatatttgctgagcacctactatgcgctgaatgatggggagagagcggagggtgagctcagcaaacttccactctcaggaatctcagactggggcagggcaggcaggcagtcagtcagcagatgtagcgacagggtctgggatagtgaggcacccggatagtgataagttccatcaagaaaacccaacggggcaaggaatttgacagtgactggcacaggctacttcagactcaggtgaccagggaaggccccttggacacctgggtgtccagaaggagctgacctgcaaagatctggggagaagttttgcaaaattagaaagacctgccacggcaaaggcaggatgctgctatgtgtctggggagcaggaggaggcaaaaagagtgacccagggtgggagaggtgtgcggagacgtcccactttctggtcctgtggagactagactgcagcggggcacgggtgggaaccagagaccagctgcaggcttgggagagggcggcagctcaggcctggggtgagtgcggcggggagagagggggatggttctggaatggctatggaggtggaaccaggttctggaggtggaaccagctgattagctgatgacttgggctttaggggatgaccctggggtttgaggccccagcaactgggtagtgagggagctttgggtggcaaggaagtgggggtgcagctggcaggggttgggggggggttctgtgatgctcagcctcctggccctgccatgggaggtgaggtgggcgctgacagtcctgtctccgacccaggaggcccccctgctgactctcaagcagaagcaggaatggatctgcctggagacgctcaccccagacacccagtatgagtttcaggtgcgggtcaagcctctgcaaggcgagttcacgacctggagcccctggagccagcccctggccttcaggacaaagcctgcaggtactggtgggcggcaagggtgagagggggctcaggcaggagggggcggctggaggaggagctgctccattctctccctgcctggggtgagggtatagcagtcagctccatccctcacttgctgtaaccctgcagggggctcgcttttcagacaggaacaggggttcagtgaggggacggggcttgccatgggccttgtgagttggggaggggtcgaaaggctgttttcactcttctccaccctgaaatctccaactcctggtttcttctggggctgggggtggctgctttcacctctcggcctgatctgtgaaatgggtacagtgaccgtgaggcagagctgctgtgaggaaggcgtgtgatgtcccggcagcctggccctcagcaggtctgctgggcgcctgtccctcatcgcaccacatttcgagttcaagcccaagcaagacctggggtcctctaagtggtgcttggagggaggtggagagaggggtgcagccagctggagcccaggctgctgtgggggtggtggggggctgtaggctcaccaggggggcccatgggatctgtctggagctggaggagctcttagaatgccaccgtgtcatttctttttagcatgaaatctggcttcccagaggatgggcttagcagaaccctgtccccagccccccagacgcaggcctgcgtggcagggccctggatgggggtgttggggtgaccgacccagggtgagtgagggcacttctctaacccctctccttgctgtttctcccacccctgggcagcccttgggaaggacaccattccgtggctcggccacctcctcgtgggcctcagcggggcttttggcttcatcatcttagtgtacttgctgatcaactgcaggaacaccgggccatggtaagaaggttctcctccccttccttcatgctcccacccctccaacgtgcacacacatgcacacacatgcacacacacgcacacaagcacacatacacacacacacacacttacatgaacacatgccaccttgccaggtcagattctggaccgaaccccctgctctgatacacccgtgcttcgtctaccctccaaagagtcctccctgtccaaaacctggcctttccctgtgtcgcatccccacaggggggccctgtggaaccaacccgaggggaaggtgggaggtgcagccctccagggagagccccggggccctgtccagaacactgctctcaggactggggatgcccgtgtgcacatgtcagctgtctctgtgtctgggtccccgccggtccatctaggtctgtcattcgcttattcccatattcactgagtacgagctgcatgccaggtacagctcaaagagctgggaacacagtggcaggccgcatgcatgcgccccagctccaggcagctcacggcccagtgggggaaggcagacaatcatgcaggtgtgtaatgacacaccgggatcaggatggcagaggaggatgtcgacgtattgccattccttaggatccatggaaaccagttccaggaccctccctaccccctacagataccaaagctggtggatactcaagtctctgatttttgttttattttatttatttattttttgtgagatagagtctcactctgtcacctaggctggagtacagtggcgcaatctcgactcactgcaacctccacctccagggttcaagcgattctcctgcgtcatcctcccgagtagctgggactacaggcacacgccaccgtgctctgctaagtttttgtatttttagtacagacggggtttcaccatgttggccaagctggtttcaaactcctgacctcaggtgatccactcgccttggcctcccaaaatgctaagattacaggtgtgagcccccacgcccggcctcaagtccctgatttaacacagcagaatatttgcgtgtaacctacacacaccctcccagagactttaggtcatctcctagattacttataatacctaataccatgtaaatgctatgtaaatagttgttatgctgtattttaaaaatttgtattattttttattattgtattgctatgagggtttttttttcctgaatatttttgatcagagattggctgaatccgtgagtgcagaacccacggatcctgagtgctgactgtatcaggagcagaaaacagggaggggaaacttggctggggcgtggccagggctggtttccctgaggaagggatgattctgttgaaatctgtagtgggagcccatggggggtgtggaggggatggggagagtgtcccaggcagaggaaacagcatgtgcaaaggccctgggcaggcaggagggaagaaacttccaggaacagagtgcaggggcgctggtgtggctggagacagaagtgggtggggcaggaggctgaacttgagcctgggcctgtggcggcagtgatgcttcctggggcctcaggctgtggtgaggacctgggccgtgtgccgagcagtcatggagggtttccccagaagtgggacaggatccacttcgccctctgtagccctggctgctgtgtggagcgtggcctggtggagggcaaagcggtgaggaggtgacacttctgaccgggggttgtggccccctgatgagagccctgcttctcccaagaggtttgcaaagcgtgcctagctgtgtcacctcactcgactttccccagcactgggaaggcagtgagtcaggggctaccattgccttttaactgatgccaggactggccagagaagtcagctgacttgcccaaggtcacatagccagttaggagtgactgccgctctcctgaccctcgtcctggagcagtggttctcggcagtgttcggagccccgtttcctctttcctcccaagaagacaagcattcctccacccacccgtcccctccgcccacagctccctgcaggccttcagggaaaccatgtccctgtagagggagaggtcctctcccaggcatgggttcagtggcctccagactgccctcctccttgtcgttcttgcgccccttcagtgctttctccaccatgtcattctcctgtttaacactcttcagaggccgctcactgcgctgcagtacaccctggcccttgagggcctccaccagctgtgtggaacctttgggcaaatcaaaaatggtgcctctttcttcacggtgatgtacacagcttccaggcactcagcttagcaagcagaacatgggctggaattcagcctcactcaccaccacctttcccactccctgcccaagcctaatgcccttgggcagtgtacaacctgaaccaccatccatggcagccctgacaagaaagcccatctcctctctcccgcctcctggttcattccacttcttctagccatctccgtccctgaccactctggcttgtgtgttcacccccatcgacccccacctccccgtcttgtgtagcactgtgctctctgtctccacagaatgaatggtgatgttgcaacatgctttgtgtccatctccccatgagaatgtcagctccttgagagcagggacctcctttgttggccattcttgtctccccagtgcccaacacagcgtcctcccacagtgaacacttagtatcggcggaagaaatacataagtaaatgtggtgcggctccgtgcctggcatccagagctgtggtgccgatggcataacaccgcggtccttccctttctcaccctcctccttccctcctctcctctgtccaggctgaagaaggtcctgaagtgtaacaccccagacccctcgaagttcttttcccagctgagctcagagcatggaggagacgtccaggtaggaggccggggcggggagacagaggtgggcaggggtgtgagtgggatgagggggtggcaggttagtagctaattttgtgttttgtgagaggagacaaaacgccgaagtgagcagcctccggggtgtgcatgggtctcttctccagctctggcactttccatctgagccagactgcctgggttctaatcccagctccaccacattctggctgtgtgaccttgggcctatagagcctccctgggcctcagtttccccacctgttagatgaggagaaaaacagtgttactatgtgtcctgccctgagtacattgcctggcacgcagttagtgttcaaaagaaccctatcaggctgggtgcagtggttcatgcctgtaatcccagcactttgggaggctgtggcaggtagatcacgaggtcaggagttcgagaccagcctgaccaacatggtgaagccctgtctctactaaaaatacaaaaattagccgggctggtggtgcatgcctgtaatcccagctactcaggaggctgagacaggggaatcgcttgaacccaggaggcggaggttacagtgagctgagatggcaccactgcactccagcctgggcgacagagtgagactccatctcaaaaaaaaaaaaaaagtaccctatctggtattaccgttgccggtgtgctgaacgaacaggacctgccagcacaagctctctccaccccactgtctgtgcagacatgctctgtgcttctcctgtccctgctcaaaattcctgagcaggctccataacttagcgtggatactaacaagtcttcccgtcactttgagtcacaaaacaccgattcatttttaaagtgccggcccgcagatcagtaacgctctaaactccatctcagattccgtcgtctcctcttccccagcccatgcccccttcaggcaggaagcttcaagaatgaaggggggacatggggggtactttttaccaccctagccccactctaggctcccaagattggggggtggggatgaggtaggggcagagggaggtcaagaagagtggcggaggaggaaagccatgccggaccagagctgtcatgacctggctttggagttctctatcagggctgatcaagggccccttctggaactccttggaaaactcccaagatgagaatatcttagttgcagtgcttttatttatttatttatttatttattttttgagatggagtcttgctctgtcgtccaggctagagtgcaatggcacgacctcagctcactgcaaactctgcctcctgggttcaaccgatgctcctgcctcagtctcccgagtagctgggactacaagcacacaccaccacacttggctaattcttgtacttttaatagagacggggttttgccatgttggccaggctggtcttgaactcctgatctcaggtgatctgcccgcctcggcctcccaaagtgctgggattacaggcgtgcgccaccgtgcctggccattagttgcagtactcttaatgtgcgggaatgtatttccttaaaattcttccctcagccttgagggtagcaagattcccatctataaaggtattcaagcaagccatggttgcctatgtgtcagaagcatagagattctcccattgaactggttggaggctgcggtagattagctgcatgctcagataccttccagcttcaagtcctgattctatgaacctacaacatcgtgaggtgggagctgcaaaccattccagcttcccatgagggtatggtatccttgggtctagtgtgtggagcggggtcctgaggaagaaggcatgatgtggctgggggttggggatggcaaagcaggccccaccttttctgcatctgggtgagagacctacccctccaccctaggacccacaggggccacaaggcccacccccacttcccaggggatcgtggaacgtgtgtgcgagtgtgggagtatgtgtgaggggcgtgagtgtctcctgaagcccctttcagggcattgtgggcagaggctcaggcccaggaagtagctggccacaggcagtgggtccctggctcaccggcactggccacaggcctggccgctccctctctggctgcacacacagggctgctgtctggccccgcccttgccctgggtatcatgaatctcacccgaccagtgcttcttcctctctgcccagccagcgaccctctttgccatcctcagtttatcctttctgcctctctcagccttttcttttgtgacataactcctggttgcagaaagggggcggatttaattgagtggtgtgtgcacgtgtgtgcatgtgtgcatgcatgtaagcgtgtgtgtgtgtgtctgcggagcagctggctcagcctcagggactctccctggagaggagaactgggcatttgttgctggttcattaattcatctgaaatagatccatgagacccgccatgctgggcacagaggcctggggagcccattgggcctggcccctgtgcttagggggccatagtccagctgctgagggttcccaggacagagggttgtcagggctcccaaactcacccacccgaggcccctgccacaccaccaggagggcctgctgtcccccactctgctgtgcagtctgtgtcttacccgttttgggtgtttacatctccatttgcttacctgatgtctccttggtgacctgatgggtgacagcaaggaagtcaggagagacgtggctgttgtggaaactgaggcccagagaggtgcaggggccctcccagggtcacacagttagtgagtgccagggccagggctagaacccgggtcttcccactccttgccagggctctctggaatcccgagcaactgagaagtgctctgatgggcactttcctctctctggggatgggaggcggagggggtgggggtggggactgcagggaactgggggaaaggtgaatcaggaaaccatcagctcccccaagagacgttcccaccacagtgtaagcggagaccctgggtcccagctctgccgcctgctggtctgtgatcagggccagggcatgtcccgtctctgggcatctgtagggtgaacaggctgtactctcagtgcccttctgctttggcatgggtggatcgattcccacacttgtgctagtgcccactagacagtctgaggattctctcctttcctgggtccccagcatctagaacagtgccaggctcatagcaggtgtccaataaacagtcactcttgagcaatcagacattcctgggcactactggcagccaggcaggcctgtgctgggctgtgggtcaggcagtgtccctgggctggtggcccagagggcccccaagccagtgggtgggttgggggagtgcggggctataatcagggagagcttcctggatggggcagccctgggccaactgcttcaggaggaggaggagttaggagctgttgagagtccagaggaaggggtggagggtgaaggaagcccccactcacccacccctggcctttctcccaccagaagtggctctcttcgcccttcccctcatcgtccttcagccctggcggcctggcacctgagatctcgccactagaagtgctggagagggacaaggtgacgcagctgctcctgcagcaggacaaggtgcctgagcccgcatccttaagcagcaaccactcgctgaccagctgcttcaccaaccagggttacttcttcttccacctcccggatgccttggagatagaggcctgccaggtgtactttacttacgacccctactcagaggaagaccctgatgagggtgtggccggggcacccacagggtcttccccccaacccctgcagcctctgtcaggggaggacgacgcctactgcaccttcccctccagggatgacctgctgctcttctcccccagtctcctcggtggccccagccccccaagcactgcccctgggggcagtggggccggtgaagagaggatgcccccttctttgcaagaaagagtccccagagactgggacccccagcccctggggcctcccaccccaggagtcccagacctggtggattttcagccaccccctgagctggtgctgcgagaggctggggaggaggtccctgacgctggccccagggagggagtcagtttcccctggtccaggcctcctgggcagggggagttcagggcccttaatgctcgcctgcccctgaacactgatgcctacttgtccctccaagaactccagggtcaggacccaactcacttggtgtagacagatggccagggtgggaggcaggcagctgcctgctctgcgccgagcctcagaaggaccctgttgagggtcctcagtccactgctgaggacactcagtgtccagttgcagctggacttctccacccggatggcccccacccagtcctgcacacttggtccatccatttccaaacctccactgctgctcccgggtcctgctgcccgagccaggaactgtgtgtgttgcaggggggcagtaactccccaactccctcgttaatcacaggatcccacgaatttaggctcagaagcatcgctcctctccagccctgcagctattcaccaatatcagtcctcgcggctctccagggctccctgccctgacctcttccctgggttttctgccccagcctcctccttccctcccctccccgtccacagggcagcctgagcgtgctttccaaaacccaaatatggccacgctccccctcggttcaaaaccttgcacaggtcccactgccctcagccccacttctcagcctggtacttgtacctccggtgtcgtgtggggacatccccttctgcaatcctccctaccgtcctcctgagccactcagagctccctcacaccccctctgttgcacatgctattccctggggctgctgtgcgctccccctcatctaggtgacaaacttccctgactcttcaagtgccggttttgcttctcctggagggaagcactgcctcccttaatctgccagaaacttctagcgtcagtgctggagggagaagctgtcagggacccagggcgcctggagaaagaggccctgttactattcctttgggatctctgaggcctcagagtgcttggctgctgtatctttaatgctggggcccaagtaagggcacagatccccccacaaagtggatgcctgctgcatcttcccacagtggcttcacagacccacaagagaagctgatggggagtaaaccctggagtccgaggcccaggcagcagccccgcctagtggtgggccctgatgctgccaggcctgggacctcccactgccccctccactggaggggtctcctctgcagctcagggactggcacactggcctccagaagggcagctccacagggcagggcctcattatttttcactgccccagacacagtgcccaacaccccgtcgtataccctggatgaacgaattaattacctggcaccacctcgtctgggctccctgcgcctgacattcacacagagaggcagagtcccgtgcccattaggtctggcatgccccctcctgcaaggggctcaaccccctaccccgacccctccacgtatctttcctaggcagatcacgttgcaatggctcaaacaacattccaccccagcaggacagtgaccccagtcccagctaactctgacctgggagccctcaggcacctgcacttacaggccttgctcacagctgattgggcacctgaccacacgcccccacaggctctgaccagcagcctatgagggggtttggcaccaagctctgtccaatcaggtaggctgggcctgaactagccaatcagatcaactctgtcttgggcgtttgaactcagggagggaggcccttgggagcaggtgcttgtggacaaggctccacaagcgttgagccttggaaaggtagacaagcgttgagccactaagcagaggaccttgggttcccaatacaaaaatacctactgctgagagggctgctgaccatttggtcaggattcctgttgcctttatatccaaaataaactcccctttcttgaggttgtctgagtcttgggtctatgccttgaaaaaagctgaattattggacagtctcacctcctgccatagggtcctgaatgtttcagaccacaaggggctccacacctttgctgtgtgttctggggcaacctactaatcctctctgcaagtcggtctccttatccccccaaatggaaattgtatttgccttctccactttgggaggctcccacttcttgggagggttacattttttaagtcttaatcatttgtgacatatgtatctatacatccgtatcttttaatgatccgtgtgtaccatctttgtgattatttccttaatattttttctttaagtcagttcattttcgttgaaatacatttatttaaagaaaaatctttgttactctgtaaatgaaaaaacccattttcgctataaataaaaggtaactgtacaaaataagtacaatgcaacaaaa

SEQ ID NO: 27 - DNA, 78195 bp, Homo sapiens
atctgctggcatttcctgcagccaggcccgcgccgccagtggagcccccgcgcgcccggccggcccggagcaccgagctcgcggcacggtaggaggtaggagcgcggcggcccggggggcggcagggcggcggggggatggcgggctgggaaggatccggagggccccgccgggcagggccggagcgaaccgagggccgcggggggccggccgaagggatccaggagctcgcgccgcagccccgcggaccctggcagtagccagtgcggggaaccacgccgcggggccggtcgcgcgctggggagctggggagcgcgggagcctgggggcgccccgggccaggacgggtcggcgcctggcgggttggggcgggtggggcccgcgagtgggaagcggcgcgcccagctcggctccccacttggtggggcttaaaggagccgggaccgccagggaaggtggctgggtctgaccaccacaaaccctggccaatcagggggtctgtccccccagctcggccgacgcgggctccaaggagccaggtcttgatgggtctgcagggggtctgggatctgagtctggcgtcccagctgcgggcttgggaggactgctgtgtctgagtccgcagagtcagggggctgcctggattacaggctagggaaggaccttgcccacagcccccatctctggggcactgaccccctgaagatgtggagccttagggattgttgaggtgcctgagtcctcaagagggtcttgtgcacttgaagattcctcccggggagcggggtgcaggagggtggggcaggcaggaaggaggctggagtctgcagccccccgggcaacaggcccgtcctgggcttcccaggcaccgcccccaacccccacccagaccgctgggctgcctcctgtcagaagccaactggagttagggtttggggtgactcctgggggtatggaggggtcacagggtgggcttacctgcccctccctcgtccctgggctgagcccagcccctccctcatccttgggctgagcgggtctgccccgccgaagcggctgggtggatttcctctcttgccgtttcgcaacttgctcccctctgtgtgtctgccccagtctcttcaaggtgccttttacaggaagacttctgtaagggtcccaccccacctgatacagcctcccaaagcctggagaagtgggccagcctttgggatcctagatagatgctcttgggtctgcctgcaccagggctgatccagatcccagactgaacagaaactctgctccccaaccccaggagtaaggcccctctgcacgtttttatcccacctccttggtacacagggccttgctgttccttgaacctgccaggtgagtgggggctttgcaggcatcgggcaggtttgtggcaacctggggtggcatcatgtgcccagctgctcccttctggtctcaggctccagaactgcagatcctattgtctgcctgcacgcgtgtggggctggcctggggtgccaggaggcaggcaccgcgtgtgtctgtcttgccaggctgtgtttaagaaaggtgacacagcagataggccggatgaggagcctctgacctgcagtcctgggcctggtctcagagaggctgccctgcagatgtcgaaccccgggcagccatcctgcatgtccagtggaggctcctttctgggtccagattgggccatgaataggccatgttcttcaaaggactgctttcagctctttacagaataccaacgcaagaccgccccccccacccaacccctacccaggattgtatttactatgctgagaatgcctggtatcagtttctctcctgagatcctggcctcactctgagcgctgatagtaatctgacatgtaacgcttgggggagggagaaacactctgtgacaagccggcgggtggaagggctgtgtgtgtctctgccagctgtgttttggggactggtgctctctgctgattctgtggttaagcctgcacacgtttgcacacatacaggcacagtgtgcaggtggaaaacttacccaagatgacagaaggtgccccccgcccccattcccatttattgttcaagggacaggtgaatctgagcctgtgaccgcagctgagaaatgttgtggacccagctcagggttctcccggagaggcctggggagctggaagctctgacctccgggacagggggttgtagaggggccgaggcccagggttgcacagtgccaaaaggatcccggtcattttgacaggaagggagctgtcggggagggagccgttaggtgcagctccccttgtggagtccaagggccaggtgggtagaagtgcccaccacttgcagggttggcaggggagcccagggagtgcaccagtgtgctggggggtagatgttggggggtacaagtgagggccactggcctcccgacagggacaggcatgctgccctggatgtcctcatgctgcttgtgaccggcacaaaggaaaagaatattgttctcgatgccagctttgcttgatgacttaccgagcctgcagcttgaggaggcaactgacagcctgaggatggggctcctgggctggtcaagatttttaaaggttttggggccttggtggctgggtcttggccacggctgggtaacctttcccgtggagatgtatgggcagatagtgaagctgctccggagagtggtagggttggcggtcgagtacaaaggacttggactaaggaccgcgttgttctcttagcatcacagttgttctgagccagggcctctgggatcatgtccacgaggatgtgagattgccttgtgctggcatctacactaagcggagtgggcaccagctgtgtcctcaggaccagggcttgaggtgggagatggggagggggtgggacatgagccttcttggctggcttagagggatccagaattcctagagggcctttgttgcaaatctcagagccacccaggctgagagcaaatgctttgctcggcctcccagcccacctcacatccggctactccctccagggctggcctccactcccctcctggccctaccagctcttgcctggagctccacatcagctacctagtaggctcccctttcgtggccttcctagcccttctccagccagcagccagcatggtgtttaaaaagataaaccacttcatgtaatttgaccacttagagccctttgagatttgccatgggtctcagtaagtcctgacccctttccagaccccacaggccctagatgcccctccactctgtctcccttcccttgttctcctctccccctcccctcccctccctctcccctccttgctcacaggggtctggcgtcagccccggcttcttactccagggcctttgcactgcctgtgcctctgctttcggcccctccttggatctgcatttggtgggctccatctaattcaggtcccagctcagatgctgcctctctgagagagtctctgttcctggcccgttacccattccaaagcagctctcagctctgtgttttgttttctctttatttatactgaaatggtcatgtttgtttaattgaatggcttcctatggagaaagcgattgggccaagccaggttcatggtgggcgccgctggtgcgtggcatctgtccctggtgggtgccgctggtgcgcggtgtctgtccccatgcacggttgcctgcaagtctgctccgggctctcttcccaggggctggcacacagtaggtgttctacggttaagtgaggcacatgtggaaagccgtcatactgtctcatcccagggaggtcagtagattgagactggctgcccccatctagcaagtcccacccaccatgtcctggtttcaccagcatcggctggtgtgggacgtgaccagctcatttcctccatgctctaggatgggaaggacaagagggcgtgactcttcccagagtcccatcatctctgatttaggaatggagcccttagggtgtctcacctcctcgggatgcctaatagtgtgtttggtgaatgcagatggacttaactggtccatagatcccctctcaccctgctgacacgaagacaaggatgaaggggaaagttgaggctcaacaactgaacagtattccttctaaatatgtacattcttagggattttaagtggaaaacagggaggagatttgagggataccccacctcggcaggcagctggtcaggctgcctgttgtgaccagcctggggtcgccttcccttcatccaaggccaggggagatggcaaaccttcagtaagcgctgccgtacctggcagagcagaagcaccaccccagcttggagacagcatgcccctgactgctggtcacggatggccccttggtaagtgccctgtgcttctgagcaaggcgggaacgggcctccagacgctgggggacagcacagagggagctctgtcgcccgtgcctttgtcccttctctcgctggcccattctcagctgcttcctcgcggggaagggccttcctcggccaggggagggagagctcagtatcccggcgttgcggagggattgatgtgctattggggtgaatacggcgctcggtgtgggggcggggtggggggggggagggttgtcatttaaaggggactttggggatggtcagcagaggaaggcgtggtgttggggcggagcatccgcatctccgcgcccctttcctggcagccagcgggatttctcctgatcagctattgcggcgaataagacagagtcaactaaagggcgcgccgctgtgggtcccattcgctgggctgcggctccaggcaacggcatttgtatgcccgcctattagggtgaatgcgacgcggggagtgtgggtcgcttaaagggccgggactctggaagcagtgcgtcccgctcctgcccgcctattgcggtgaatacggcgcagcagtcgggttgtttaaagggtccaggcgtcctgcttgctggactgtgctgctttggggcagctcctggtcctgggcgggaggggagcactttagggaggctccccacattggccagagggagaggagccccgacgctggcccgtggggcaggaacgctagatgccctccttacaggatgaacctcacccccaccccaccccctgctgccttaggaagtcacccaaatttagcaaaattcaagccagagccagcaggcaccagggtggggcatgtgaccctgttctggagggctggtggggccagggcagggagggggctgggcctaagagattgatggtggtgatggtggcaggcaccgcctcggatctgatcagaaggcctagccgaggaagacgcagccggaattcttcaccccaggtgccagggtcagcagagtttatttgcctcctaaaccttggttaccccgtctgtaaagtgaggctcatggctggccctagatggtctttgtacacaagcgctgggtgagcatcagccattgtgtgggtgactggcatgaccccctaccccacccctatgggctgccagtcaaaggtttccaccctccagccaccatctccctgactcagatagtcctgggccaccccacccagccgtggccctggccctccccaggtgcaccctgtctctgccggcagaccctccacctctctagccctctcctctgctcctgaacttggcattggtcccaggctgccctgagctgtctcaggggactcctgacctgtgaaggggcagcgagtccatgggaagcagttggcctgggctctttgaggctgctgtcctcacctgtagagcagggaccatagtacatggtgtccctgagtgcagcggatccagttagtggcctggcacagggccagggagaactggaatgccttagtgtctggcctgcacactccctaccagcgagcactttgtgggttaggtaccaggcctcgttaccctgaggctggggtgctgtggacggggtgctgggacttagcattaatgctcaaagacgagctacagaggtagtgagatcccccagccccagggacacctgagagttctacctcttccccgcgcccgcctcaagaacatacctgtctcctgggcagaaaccgaccctcatgtttcattctctgtggcctcagggtgcgtgcacactctcgcctgtgccctcaacctgctgtcccttgtgttcagagggtggctggcccgagggctcacagcatctgacaggctcccctctgagacggaggaaatggggccccaagaatggcagggtcgtggtgctgctcctcgctgggcttcagtttctccatctttaaggcacccccatccctgacatttgcccgcaacccccacacctgcggggctaaggctcctgcacacgggcaacaccccggcaggaaccgagaagggaacttggacatccagagctccctcttcactcccgaggccctggcttctccaagggcttctgtccatctgctcctgctccttgagctgttttatatcttgaggatgcaccccaggttttatgcagaaagaagcatccactagttttcaaaggtttgagactgagtgattggaaatctttctcgtccttcctccctccctctctcctgcaccactgtgtgcagcccagaagaggcctcatgtgtcactgaccatgcaccagtgtgcagcccagaagaggtctcatgtgtcactgatgctccgtgagtctagcttctgcacgtggggtgtccccatggctggtcctggggcggtggactggcctgatgctgccgaggacgccccactttcccacaaatctccaccctgctgtcttgcacatcctggggccaggacaggaagagctctctgcaggtcggaaaagcaggtgccagtgtgggcaccaagagccgtttgtgctttgtaggagcgcgtgctcccacgtggcaccctctgatctccttggggcagaggaaaagagcagccagctttgaagggaaccctcgcccactccagcgcccatgctgggtttccactttgggcccagctcctgcagaagagcacagatttctctcgctccgagacctagattctgcctcggaacggcacagctgtccccaaagggcaggccggggcaggccgcttggccacaggaggctgggagagtttggagcatgaagaacacctagaaacgtcaggatgtgggccccgtctggaaacctgaggctgaggccgcttcgggacagggcctggttgtttgtcccattacagtgccagagtgggtcattctccccagcccggcagccaggctcccacgaaggctcacagagagagggggacagaggtgctctctgttggtgactggcacccaagggtgcttggccccagtgtgctgctgaacacacacggctgccgtggtcgaggatgtcaggaatccccaccctcgtccctgcaccaagtgcagctatgtggctctttcctgcccagaccctccctgctggcaggtgcccaccaacggccagaagaaccttccggctgctgcaagcccagcaggctgggccagtttctcgctcatctgattgttgtgagcagaggagaacgagttactcagtccccagccggccgagggcggggccgccttcatctctgctccatgggctgctgggtgctcacactctaaagtgatgtgggtggcaggaagtggccttgtggcgcccacctgctgagcacagggctggcctgtggagccaccccagtcaagctggctggggctctcctgcccctctctgtcttggcacaggcccttcccaggcctgcaaagcctgcctccatcggggtgctgcctcagtaccagtgggacaccagacatctaggctagctagcttggtgcccaggccccctcttggcctccccgggtctcctggggacgtcaccttctcctggaaccctgtctcatcagggtgacctctcgtaagtccaggctccttccttatctgccccttcccatccttttacgggtcagggtctctctgctgccggccctgactcccttagatctgggccccgcaaggcccactttttcccacgtgctcgggaagcaccgcttgctttcctccctcgtgggccgtgagtctgctcccatgtgtttggcctgggtgttttgcacggaggcacgcggctctctgatcattagtgcgtgaagccaggtgccctgggccgtaagcaccgccctgcaaaggcatccttcacgttctgacctgtgcgaactgggagcttgctgcccttgggggccccgaggagtggcccgtctgaccttgtggacggggtgcagtgcttggagcatgggcttagcggttggcaaagcaggtgggaatccccaccctgtgtggggccatgggcaagtcttaaagccccaggccttagtttcctcgtctgtgaaatgggccattgcagggccagtctcctggaggtgcctcgggacgtggtgggagcatgagccagctcaccgtgggtgccggccctcggcctgtgtggaagtggcatgggctctcagagcagggaggggccgcctcctatcacgcctatatcgttaatgaaaacgcttatgcataatgaatgattgtgaaagatctaaacacgggaaccatgcagaataacagaaccaaccccagcgtcgtcaaggtcctggcacctggcttgtatttgctttaggcgtctttcagcagctacaagttgcgtgtagggagggccccagagctcgattctttccccagagccgccatcctgggtttccaggctcacactcccaggcgggctttgggctttactatatatggatggatccataaacacatgcagacagatgtcacgtgaccactgacttccgctcacatccttctttctgatcgtgttagagtcgcagagaagtcgcaaaaacagtagttgaccgccctctgcaacctcttcttgtctgtgtggttctgtattccttgtacattttccttgctttatgtacataaatcacacggatttccatccttcggaaggacattctggtagttccattccatccctggagcaagcgttccggtttccttgggcacggccgagggcactctcccgggggactgacctggggtggggtcagcagcccagcgagatggggcctggtccctcctgtgctcagtgctgacttcccttcccttcccccttgtcccagagggaatcatccctacccccacccttactctgcctcagcatagggctgtgggaggaatcctggcccccaggggacacaccatacatagatgtttgccagggcctctcagtgaccaacacattttgttaattaaaaccagaaacacaggcttgagcctgagactgagggcctgggaagggtggggtccggctgaggttctgcaggtctgctcacagccggttccagcacagcaaccccttgctgaaaccacacgtgtgtggccttgccaaagacggggagacggggcttgggaataccagccaagccccagacccgcggcatctccacaaagctgggttaaatggaagtgaactgtcggcgtagtggctgctgccctggccatccggccacttcagacatgagtggcaaagctggggtgagtggcagagctggggtgagtgagtggcagagctggggtgagtgagtggcagacctggggtgagtggcaaagctggggggagtgagtggcagagctggggtgagtggcagagctggggtgagtgagtggcagagctggggtgagtgagtggcagacctggggtgagtggcagagctggggggagtggcaaagctggggggagtgagtggcagagctagggtgagtggcagagctggggtgagtggcagagctggggcacccatcccccctcggtgcttgggatcaccccaggtcaccagctgggaagtggcccaggcagatttgagccgaagtctgccaggctgtgccggacattattcctggagagggtccctgtagcacctccagatgtgtcaagggagaaatccctttttcccaaggaagctggtgctgtagcccaactgtcctaggaaggccctcctgggccggtgtgtgagcttgctggggtttccaccactaagcagcccagacgttgattctctctcagttctggaggctggagtccaagatcgaggcctttcagggctggtttctcctgaggcctcgctccttgtcatgcagataaccaccttctttctccctgtgtccttgcagggtcatccctctgtgtgcctgtgtcctcatctcctctttttataaggacaccagtgagattggactagggcccaccctaatgacctgttttaatttaatgggctctttttattattattattattattatactttaagttctagggtacatgtgcacaacgtgcaggtttgttacatatgtatacatgtgccatgttggtgtgccgcacccattaactcgtcatttacattaggtatatagggggctctttaaagaccccatctccaagtacagccgctttctcaggtcctaggggctgagacatcaacacatggattgaggggacacatttagcccataaccatgggtagtggagcagtcagactaaccctggggcccccgcactgccaggcgtctcgtcagtgggttctgtttttatcccctgtgagggcccagcatttgcccggagtaagattttgatgtgatcagagccttccgcacccatgagtgtgtgcagtgttctcagatttcacctgcttgaatcttgactgttttacgccttcccaagaggcctggctcagctggaacctgggcgagctgtagaggccccccgcttggtgaacgaagcgtcagcaggcgcatgctcacccttccgggctcaccccgcctgtgccacacgccgtcagccactctgtcccaccggcaaagtgggcggggaggccaggatgtgggtgactcggcatgtttggggtcagcaagccctctacgacacatcctgctacctactggcaggtgctgcacgcagggccgtgctctccaggtcccagcatcctgggccaggatctgtgggctggagtgtgtcagccgccccttcacctttgccctctggcccagtctagcaaacacctcctacagcagctctctggacaccacacggggcctttcctcccagggagagtggataaggggccacacaccagcggcggtttgaatgccatgtgtttcccgggcacagaccttccttgggggctgcgggcctgccctggggctccctgctgtgtgtgcggggctgacggcgctgttggggagccggtaaccccggggctcccagctgcagccaccttatctgggctgcattcatatggagcctctgctatccagggctctgagaagaacttcaaatgtagcaaaaaagaaaatgaaaacaaaaggcttctcctgagcagccatagtggacacccacccgtcacccgcagccgggcctggtgggccactcgggagtcgtgccaacttggggctgtgcttcccggcagcttgagcctgtggtcagttttgaaattgaggtttaacgaatgacctcaggaataactgtcctcccgccctgttcattatttttaaactgtgtctgctttgaatgtgcaaggaacatgctgtttgtctctggtgggcgcctgttcctggctgtggccattcattattcctgggcctcagccctagcgacggtgctggcgtcatcagcccccgcagcttgccagagcaggaatagccccaggaatttgtgacctcaggcagccacatcttcaggctagagggggctttcccacacaagagcagcttattcccatggaggctcagatctttaaacacatttgccctgttccgtgcatatcccaaaatgcattacatgcaaccttgaggtctacatgagaaacactggaaccctcttcctgctgacttgtgtcattataacagctaattttgataatgattaacatgtattttatggaggcttttggaatgacttatctcctttaacccttgaaacaaccctatgccataagttctattattgtccccattttacaggtggggacactggggctcggagaggtgaggaaacctgcccagagtcacccaccgctacatgacaggactgggattggaagcagctcacctcgtagccgggaccccctggcgcctgggggatgttgcactctgtgggctgtttctccctgtactcaatggccccagactcctcctcttctccttgttggaggggctgtcaatgctcattcccgcccactgctgtctaggaaaccagatgagtaagattgttagaaaagtgagcaaaccgggagcggacggacgcggcaggaggacccgggaagtaccagcgaggcatgaatgagacctggcacgtggtattccatgatgcttgattgggctgtttagagggctctttacttttctgtgttcttcattcttctgtttctcgctcaacatccagtgtggatcacacggtattgacagccagcagcgtgtatcaaacgcccactcgcacccagctcttcctggaggttttgcaggcaccggctctgttcacgcttaggtgccctttcaggatagagccaggcttaggggcgctgcgtgcctcgcctgagcccgagcccatcgcgcctcgcaggccgctcccgataatcctgcaggcccccgctgctgttccacatgggatccctggaaggggacctggtgaaaaccaaggcctggtccctgcccacaggagaagggaacacaggagccttctcctgtgggccccacattttgagcagcttctggcatgtttagaacagctttcagtgtgcgcagaccaccttggcaatccagtgtcacctatactgttatttaagacctagatctttaataaatcaactcacttctttttgaagtacctttatacctagaagacgtgttaatcattgctgcggttaaaaaatcaacgtcacctgtgataaactgcaggtaactatgaaaacacgcaccatgaacacgaaccactgactacatgttagcttttgtgtgccctggccacatggactcacattgtttgctgtgagctttgcccccagggccaccctgcctcccttaaatagagagatgagcaggggcagagccaccataaagacccatactcttgtcccttgatgtaatcgggaggctgggaagagaatgcagaaggcctcgctttctcactgtgacctaatggtgaaggccacctgtactgctggtgtcaccagaagcctcggtgacgtgcacacttccgagctggctcgagaggcagaggggggccttcagtggccaattccaggagatttgagaacgggcccctctccaggagcagccggaggaacaggcagctgtcggggctgcaaagcccgccccagggaggcaggagaaggtgaccccagtgacggggcccatccaggttcccagcacagcgtggctgtgttgcctggagaccccttcccacggggcagactggcatctgccgagtcatggaccattctccgaggagtcaccggttttctttttggattaacgccaggacagtgtgttcagcggggatcccagaggggtgtaagaaccgtttttttgtgccgtgggggaaataaaggtacatgaggcttcatcttcaaccccttggcttttcatgggaaaaagggcaggggtcggtttggatgcacccccagcacatggggagtggggaagacagctgtgctggcaggaagcggccaggtcaggctgatgccgggtctgtctggtcacctgctgtgtgaagtggggacttttctgcagtttcttcatgctggtggcagaggggctgaggaagaggcgttcacacctttggccaggcccttccctgctcccagctctgtacccagggcatgagtgctctggggctgccataacaaatgaccacaaactaggtagcttagaacaacacagagtcattcacagtgatggagcccagaagtctgaaatcccagtgccggcagggctgcgctccctccgaaggctctgggggaggattcttcctgcctcttccagctcccaggggctccaggtgttccttggctcgtggcggcatcactccgatctccgcctctgtcttcacggcacgttctcccctgtctgtgtctcctcccctgtcttttcacacgtggaccccaggcattggatgaggaccccatacagtgaccctctttccaaggtcagggtcacaggtactgaggttaggacttggacacacctttcatgaagacacaattcaaccctccaccgccgggagagggtggccacagcgggcagcccgccgtgactcctgggaagacggactaggatcggaacctgtagaaagaccaggggtggcattctggggcatggggatgacatcacagatgcaggcgtgcgtgatcacagtcgtgtttagttctagggagcagggggtttttcatttcacagatgagaatagtgaggctttccaagaaaccaggagctgcctgggacacccaggctgtcagcagtgagctgggaatgaaagttgggtgtggccacgggggagaccccggggaagggaagagttctgctccccccagaggcatgtttctccagtgagctctcacgacaccacaggccgctggcctctgtgtctgtggggcaggacaccttgattccctggcctcctgacccctgtcttgcccctgagatggtgtctgcacgctgctgacatggcagcccagcttggacgggtgggacgtgcccacctaggggctgctgggctcctccctaaggaggaggagctgctgggttcctccccaaggctgcatcctggtcccaggtgcccggaagacaacctgggacaggcctgtggttgcatcagacatgtttacctgggaaccaaaaaactttttttttaaaaaaagctgtctttaaaaagtgagggggagaaaagcaccgtctgctccccccggggacttgggaccctggctcccgagggcaacttgcctttttgtactggctcagactcaggcatgcagtccttagcctggagcctcctgcctggggcaggagggcaacagtgccctcttgggaagcggcagccatgccaacaggggaaacagctgctggttggcttcagcatcctgatttgctgtgtgtgtgtacgtgtgtgtctgtgtgtgtgtgcatgcacatctgtctgcttatgcatgtgtgtgcatgcatgcatctgtgcacatgtgtatgtgtgtgtgccatgcatgtggttgtgtgtgtccatgcatccgtgtgtgtgtgcctgggaagggggtggtgagcagtcaggatgaaagaggaatgcaaggccaccatcacactcgtgcatgtcagcacctggcacacagggaacactcaccagcagccacagctggcccttgtgccccgggctacgtggtgcctgccagggcggtgaccacccgttgactggtcagtgacgggggggtcgtttgatgatcaaagaggaagaagggacagggcgcaggggcctcggggagcaccgctgtgtgctggaaaccacatgtcctgataggacctgcctcccaggacgaccgtgaggaccaaatcagatcaaaagagcctgggcaaggctgcagcgggcacctgctgctgctgctgcctgacgcataaactgtccccacggcctgcgcgggcggcacccctgccacaggcacacatgggcaggggaagctcatggagcggcaagcactctggtcatgttgatggggacagggaggatgctggcaagagggtcagccacagtcacagcactcactgcctccctcaccagaggccagtacactgcaagatcttgcccctttcctggccaccagatagggtaggggtgctgggaggtctcccaaagggcgactgcccccccagcccatgcctgtaggaacagaagacagctctggggggcctgacccgggcctctgctgcattccggccttggggacttccagcgtggtggtgtggacgctcggggggccctggacagtgggagagccattctgataaggctggaagctgataaggctggaagcctctggaaagggctattgctaagacacagggctggagtggcctggaggtggctttggcagctgatatataaaggtggctctgtggtgggcccagtggggaggtcagggctggggcaggttctgagcctctgggggtccatgctctctggaggctgcagcccacggaggagacctggccggcccctgccaacccacagcagaggctactcagctcctctgcgaattctccagctcatcctgagtcttaatccccttatcttaataacctcttttatcttgtgccggttacttgatttttcacctgtttgagcctcttatctagctggttgtcacctttgccttcttaaaaacccttagcctccctctgggagatgcaatgctgctatcatgccaatttcctctcctgctttaaggctcttccaaaattctcctcttaaaactccatctgggtagtggatttcccttcagtttgtgccttcaagagaaatctgtgtcctctcccgtttggcttcgtatgatagaaaatgtcaaagatgtacaaaagtgcagaggacggtgcccccgccctgccgtcatggaagccggttccagacagcgccccgtctcctccacctggacagccgctggaaagagactccgcactcacctccgttcctctctcttctgtgacctctgttcttccatcttgttacccgccttcagggctgccagcaggaaggtgtggggggcaaagtacgtgtcatgggaggggcacttcctctccaccctccctgactcctcggcccttgcctccccaggtcaggggtgggggcccacatgtcagtgttggatagtagaaggaatggggaaggttctggaagatcccaccccgatgcccctcatgaccttggggagtatgtagtggggtccagcccaccttcccaaaagacaactaagaaagtcagcaggtgcggtttccgacctgctccccggggagtcccggctgtactgtatacacatcgtggtcagactcccccaggaggcattcactggcacctactccatgttcgggcactgggggtgcagggagagctgtctgcaccatgcaatgggagcctctgcagccagtgtgccaagtctgggtgccgggggcgtgcggaggatgaggaacaggagagtgaccaggcaggagcccagctagtggccccagaggtcctgggaaccgagggcagctcggtgaggccagggccatggtgggcgttcagtcgcaagaacaggctcttggtggtggagacccagacgagacagaagggcccgggtcactcgcatcaactcccacttgccgaggctggtcctgttcctccccagcgcctttcatgcccctgtgccctgtctagggccacgcccggccttccctgccccgacgcacccacgcgtccctggacacgctcactcccataaatgcctctgccagccgtccgcctctcttccagcagatattgattacagggggttttagtcccaagggtaaatttctggaagtccatccctggcttaaaggacacgtgagcacttggcgcctcgattcgagttcacaaacggcactccggagaggtcagtgcagctctgcctgcgttgctccgtcccagctgggcctgcacggggctatgtgcccatagcagggctgactgggctgacccacagcctggggcacgagggagaggctggaagcaggccttgtcaccatgggctggcctcggctgcggctgtcccgacccaggccgcttgaggtcaagccaggtcggccagcagaggcaggagccgtgcccaggcccatggcaagccctgtgggacacaggctgtcagacacatccagtcctggagctggcgcccactccccctcctcccagggcctctgccagcatcctcctgggtgggcccggcccagccctagcccctgactctggagcaggagtcccaagtccagcactcaggcctcacagaggccttgcagccctcccacccgcccggtcctcttgagacggggtgagtcacacggctgtggttctgccttggggaaaagtgaagcccaggacgtgagggtgactgggaaggatcccaggacagagctggggcctcggcccacccagagctaacaaggtgcgggctgtgcgtttagctcaggagggtcgtgacagctgccaaggcccccgtgccctcagctgagccacctctaaaatcccagcccctcgtgaagaccagagctgggtgtgctgggaaggggcgtgagaggcgaatcataaatagaaacgccagctccagccacggcgaaggggatctggctgccagggaccctgcagtctgctgccctgtgccaggccgcttcgggacaggctgtacaaaggccaactcagtcatctcccaaaccccagaggggccccaggattgtccccctccccagagagaagcctgcagcctggagctggcctctccccctgcactcaggcacagctgtgtgcccagcggcttagcagctctgcagaaggcaagcgacggagtgcccgaaaccgggtgcgatggaaaccgggtgccagaaagacaccgggtgcctcgtcccagccatgccgtgacagggtccaacagccgtgcccacaggcagggggcttctgaccaccacgtcccacccagcctctcctcaggccagaatctccacctgcattctctccgtcccccactctcagaggtacccccaaatcctgtagaggaatccacaaacgagacccctttcctaccttcccgtgagttcccctcctcgtctgccctcacctcccccggagtgagctctgtctcctcaaagagtcccacacgccctgggggtttcccgcaggaaagaacagacttccccagaggtgggtttgggggtgggggcgcagctcataagggcagtgtgtctgtctcgctggtctgcccgccctggtctgagagctccgacggggccgcgggaccctggcttatttttcttttgtacccctagcatctggtgagatggaagggcctggaatagaaatgacactcggcttctgtgggctcctggggccaaggcccctgggtctggcttgctcccggcagggcggaggggcccccaggtgaatcctcccatccgcaagtggaacggcagctgagggtggtgttcagagcacatttgccgattgtgaccccgggaggatgtaccagtgtccctgtaaccctcagcccacccagagtcatctaggagtgtcgtggagttgtgactttcctccaggtaacaaagttaagtgaacgcaggctgggctaccaggtgcccattgccaaccactgagggcgacaggccggggttctggtccggtcttgttcggccaggccccacttcccaccagggcctccctcttctcatctgtaaactgcacaggggctgtaaatgcctcgctggccctgctggtctggggtctgagggtgcgagtctgtgaatgtcctccaggaagcagcccccagcgcagacccctgctcttgtgtgtgggtctcagccggcactgggactgcagccgggtccgatgtctcccagccctcaagaggccaaacccccaccccaagaacatcatggccaggacagcaggcaagtgagtgccaactcgctgggcaggggtggcttccagaaggttcagtggaggctgtggggcagtgggagacagtgctggcccgggaggaggggatgtgaccaagggaatggggctcgtgaagtggcctggcctgtgggactggttgcaggggctgccagtgtgacagaattgtgggccctgctgaggtggcacagctggtggtggagggaggggcagggccccaggcttcatccggaggctggagccctgggggaggttcatcaaggggctgacggggttgaaaaggtggctctgccacaggcgatgggaggcagtggggcaagttgatgggcttcgtcaaatccaggcgggcacggggccagcccaggtgcacgcagagagcgtgagggccaggcagagcgggagggatgggctcctgtggctgaggggagcgcagtgccccttccgtggggagtcgcaaagagccaggctgccccccaaaggcctccgctgggctagatgctacagaagctgcctgtaatgggctgaacagcgtcccccaaaaatgtgtccaggtcctaaccccaggtacttgtggatgtggccttgcttggaatccgggtctgtacagatgttactgaagatcttggtatgagaccatcctggaggatccgggtgccggggggtggctctcgcaggtcctggggaatgagctgccctggccccaggcctgacctcccgccagggtggctgcctgagcgtggggacgccttgggggactgggggttggctccagcagaccccgggcttgcaggatttgtaagggggacatgtttttcccattataaaaatgttccccaagaggcagcataacatggggtgtccccaaagtcagaccacccacgtgtgtggctgctcagccagtcacaggtggtggaatttggggccggtgtctgctgtctcagtgtcggtggaacggggtcaggccaggcccagcccgcactcccctgcagaggtcagctggtcccggccacggagcctggcgggtttgctgctggctgtgatcatgatcaatgcattgatgggaatgtgaagagttatggaaattccactttgttttttaaagaaacagcatcggtcacccatagtccaccgctgccagcgtttctgcacactccagctccccgtcatggggctttaccatgtcgagggcacctcacactgctccttggcaccatggcaccccacttccctggggctctcattgtcagcggtttcattgtatcccccagagtgtgagctgcagaggagggggcatgttctgtccccacctgcctgtcacttccacccgcgttgggttttttgtgtgtttctgtcctgatgcagcctgcttgaaccacctcacaaacaataaacccgtgtttggtctcagggctgtgggaccccctgaggatgggaggagccatcgaggtttgccgggctcagtgggtgctggagcagctggcccccgccaggcctgactcagtgtgacttgaggccatcgaccctctgtcctgctacccaaacccagtgtccaccccatagctcccaccacacaggatgatcccaagagctgtcgattccacagcatctgctgtgcactgcagcccgggtgccttcctcgggccctgctcagctatgaccacggccaggagctaggaggatccccctgggctgcagtaaagcaaaccaagggcccagggctccaggatcatctggtcagcctccagtcatagtggactccaaagcccatgctctttccccaaagagccccaggaaaccgggacagaaccgggccgggccctggcaagcaccagtctgcgttccgtgtccagacctgcccgtcctggacactgcgtgggcgtggaagcggacaagatgtggcctttggtatctggcttctttgacttggtgcatctctgcggctcatccgtgtcgtcgcatgtgtgagtgccgtgcttcctgcctcctgaaggccgaatgttcttccatccgttgcacagatgtgatccatgtttatccgttcacccatgtggatgtctggctgtgtccgctctctgatggccctgagccatgctgctgggagcgtgcgtgcgcggaccacctgggggcgtgtgcttgtttctcttgggtgtgtcgcgtccgtgcgttttcgcccacagtgcagccccccatgggcccctggagccggtcgctggtccacgcactgggctgtacctgcctcctctgccccgctccgcacctgcctcctctgccccccccgcacctgcctcctctgcccccctctgcacctgcctcctctgcccggctctgcacctgcctcctctgcccggctctgcacctgcctcctctgcccccctctgcacctgcctcctctgcccggctctgcacctgcctcctctgcccccctctgcacctgcctcctctgccccgctccgcacctgcctcctctgcccccccccgcacctgcctcctctgcccccctctgcacctgcctcctctgccctgctctgcaggctccaggaccgtccagacccagatgctgggtcccaagggtctctgctcacacacccccaccccgtgtgccgtccgctgtcctgggtgactggttttgtccttttcctctggtctcactgtttccttgtgtgcaaggagtgggcagtcactgcccttctacccgcaaggctgcatggggctcggggatccccaggtgaagggagacctgctggtcttccagcctccacccctgcacacgacttcctgccgggccccgcggacacggagacagagggacaggtctccacctgagtgggtctatgaggagagacagagacatgaaaccagcggtcctgttgataaacgcaccacccaggctctccacccgcgagacggtgactctcagacctgtaggatggagtcattcatttcattttcctgtttcattctcagtttcctcatctgtaaaaagggaggggagctaagcatccgggtgaaatctgacctcctgggacacggagcagcgagtggggagggatcctgggcccttgtggcagcagggcatggaggggtcgtggtggagaggtaggggcttcccagttgtacagaccagcagcccagaaagtgttctcttggaccatctgggcattgcactcccccagctgtgggcagccccgtggactttggggtggcaccagggcccagcacctcctgcaccaacctgccgtgtggccctgggcgagtcagcttcttctcttggcctcagaaaccagctgtcggccgggcacggtggctcacgcctgtaatcccagcactttgggacgccgaggagggcagatcacttgaggtcgggagttggagaccagcctggccaacatggtgaaaccatgtctctactgaaaaaatacaaaaaaattttagccggtcatcgtggcaggtgcctgtagtcccagcaacgcgggaggctgaggcaggataattgcttgaacccgggagacagaggttgcagtgagccaagatcgtgccattgtactccagtctgggcaacagagcgagactccgtctcaaaaaaaataaaaagaaagaaaagaaactgcaactgtaacatggagagaaagtgggaaaatggcgcatttgtactcttgcagtcttttttccttccagggcgtagagtcctcccagtccctgcactgggtgggaggcgggtggggggtgggtgttcctactgtcaccccatttagcatcctgtgcccaggggaggacacacatgcaagggtggcgtaggcacctcggcaaagcactgggatgcatgagaatcgcaacttggcaatgcattgagcgaggtgcgagctttccgttcatagaagggttccccttggaggtcagcaaaatccagcccctccctgtcctctctgcgcaactcgggccataatggaccccattaatgccatttcctgaacactttggcaagctctccaccacagcggaagacagattgggggtccttctgtttgagaccccccccatttcctgagagacagattgggggcccttctggaagctctgttctgaggggaaccaaggaggcctcggggctggacctgcctgctggggcaggaggggtttctagaatccacgtccttcccactatgcagagtcacagggaggatgctggacccgagggtgtgttcccgggtgagcaggaggcgcttggtcaaaggacgctgtgcattgtccaggagcaatcacgactcggtggcatctcctgtgccctccctgcatcacacatgatgacgatactgtctgctgggcggggggaagcctgggtggctgtcagcatcagagcactcgaaactgcctggaatgaggctttatgggttgacgttgtttctgttgttaggtggtttttattcctgttttgggggcctcttcgtacaaggcattgggctgacccccacccaagttggtgcccccagggtcctacctgccaggctttgtgtcttcttctctgcagtgtgtgacccctgacccttgacagatggcatcggggaaggagtggctctgaggtggtcacctggccccagggccccctgggctgtcacacccatgggctgaccagagcaccagctgcagctctgcatgggcgggtaggggtggggtaggcacctcaccttgatacacccaggggcagcctcagctcctggacatgaggggccgccccaggtacccacataccccaaggaggactaggatgggacgtgtgggcagcaggtgaccttatgacctctctggtcttggaaacaaggctcctacagccagtcctgggtaatgtgagctgggggacagaggggagccgggacgacgatgcctgtccactggtggggcagcatgtacttgggtggacagagggcactgcctggggtcctggcttccctcggtgcccctctctgctgggggaggccctgcgtgctcacggagtgttgaaagtgggctaccaggtcaaggccttgtgttccccctcagactgggacccctgagtgtccacacaggcctctcaggaggacacgctgtgctggcttttcctgggctgccttggccctgggaagggtgtcctagcttggctgtgagccctaccctgcctgtccagcacctgagggatacaggggagagcttggctgtgtgtgtcactcctgggtggcaccatgctggcccttcacagagagcattgctgtgggctgccccttccagagctgaactcagcagcctggccagggagacaccactgcaattatcccctccctccttctgaggactcaacctctgttaatacagcccgagatggtggctgcaatttgggggaccttggccgggttctcctctgcagagggagctccttggcagaggtgctgcttggcggaccactgcacacccccctcccaggctgcacagccgagcagtgggcccagagcttgcgatgaatgatcttgtgaggctggcttctcagagcagggggggcacctctgcaggcctgccaggagctgcagggaagagctcctgttggtgtccttggccaaccacaggccaggctgtgagcgccccaccccaccaccagcttcagcctctgcgagtaaacgcaccctaggagcttgtgctccttcagggcgcgtggctgggcctcggggactccagcagggaaggctggctgcctgaaggaagagaggccgggggaagcagcacttggacccagggtccaggagcccagagagggaagccgagagacagagagagaggaggggaggctggatgtgccctctggaagtgactcctccccatagagcaaggcagcaaggcctccctggggcgggggcttgtccagaggccaggggaaggcctgccacccccatcctgcccccaaactcctgcgggcagggctgggtgcctgggctggtgattaaagccccctgctcactggctttccccagctcactggaggccactcctccctgcctttcccagaatgggctcaactccatcactggggtctgtctccacctctgccccagcctggtggctcttccttcccccatcatcctggcaggttgctcgtggccccacagagcactggcaacagcacagccagcaccttcagagctgatgcccctggcagaccccagcaggcttggccacggccccagccccggggccacccgtcccgcacagcctcctggtctccgctcactcagctggccggtggccacctgctcctccagggctggaagcttccacctccctggctctcaggcccactgcctcatggtcaccccagggtcccctgaacgggaacagctgtggtggtgtgtgggtgggcagtgggggagactgaggctggagggttttgggggagagtgtgggcctgctcgcaccccaggatccccactcggtgtcagcgaagacccatcacccggtccctgcccttggagctcaggtgcccctggagggcggagacggacctcagtcttggcccacagcagccgcgtcctctttgttttgctctggtcttcttgttggagtttttgcccacacgcctggctccaggctgccctggaattaggaggatgagcaggctggggccagatgaggagacacagccacgtgctcagcttctcagccgcgtgtccctaggcggccacagcccagctgcttctcccttggtcccccacctgggtaggcagcggcctgcagggccgtccactgggggtggcacaccaagcccaggagcctcaccaggagggccaggcaagggggcactggcaccacccagaagaggccccaggtgtgcctgagggcattcaggacagaggccagccccacagcacggcaggcgagcgtcttttctggaagtgagtgtccaggctccactgggggcccaggttcatgtcttatttccagtgtgaatgctgaggctcagcgtggcgggtttgagattgcgtccacaatcccagcaggcccctgcctccagctgcactgcctccaagtgacggcccccactcccttacccctccctccccggctgacccctgctgccacctggctgcagctagcatctgaaaatcggagtctcctttcagttgggacaggtggggtgggtctagctgggaggtggtgggtctagctgggaggtggtggggccaggcctgcctcagggaccacgcccagcccgcccccatgccagggcttcttagggctggtggagtgatcgactacaggggtgtggggtcggggtaccaaggccagctgacccagtagctgctctgagccttcagtgggcctggtgtccatcaggaggacaggtggacagggccggggacgggctggcctggccgggcccacaggcacaggacttggctgaggcagcccggagaacacgcaggcatggctcgatgctgcgtcctcagcagtgcaggccacttcctgtgcccctcttgaggttcaaccactccacagctgcctctgataaatgtctccccagagggaggcctggcctccccctcagctccacagctatctccaaagtgcaaaggggatttggggcttcagctgtgctcctttgaggggatcccaggcgcagcctggcccacgagaccttagatgggccgtttcccctcttggggtcccagtgtgtttgtgtgtgatgagggtgtcactttgtcacccaggctgagtgcagtggcatgaccatggctcatagcagcctcgacctcccaggctcaagcaatcctcccacctcagcctcctgagtaactgggaccacaggcatgtgccaccacaaccggctgtttttatgtttgtagagacagggtctcgctatgttgcccaggctgatctcgatctcctaggctcaagcgatccacccgcctcaggctcccaaagtgttgggattacaggcttgtaatcccaggtgcagtacacccggcccactgcatctttaaaatgtgatgatgacccctgctcccctgctccccgcaccttgcgagcattccgagaatcatatcagatgggacagaacatccaggaggacctgggggctttaaggtccatcagtgcagcagatgtcctgggaaagcgcatgtcccaagccccccagggcccagctgccacagctgaagtgcatgccacggctctctgaagaggctgctgctcctgcaggggtggtcaggctgcccacattagcactaggcattcggtccacccagacacagcagcctggtctcttatgctgctgtctgctctcagggagtgcatctgttgctgtggtggtctccctggggtgactcaggaggcctgcgtggtttcctcacagcaggatcttcatggtcacttgcattgaccttagcaagtttctggaatgcaaacgtatggtgttgacatgatggctgctgtcctttaactgatggctgctgtccttccttgggacccactgacctctccatcccatgtgcgaagagccaagcatttgggcttatgttcctttatccttgtgattttagagcatttcccctccacagtcttgaacgagaatctatctggtttaggcagaagcatctgtgccggatgttactgctgaaggctggctgcggagttcctgcttttctggcccctgccaattgatggagcaccccagtggccagagcctcctctctgcccccatgcagcgcggcccagccctgtcactctgggctgtgggtgaggaagccacataggcgtggagggggctgggtctgggctcacactcacctctgcaggcgccttccccagggcctcctgtgggcctgggacatcatctccctgactcagagcaagtcctgatttacaaacagggcctgagagatgaaggtggccagctgaggccacacaaccactggagtcatggctgggcccttttccccagctctgcggtccccaggcctctgcaggaggacagaggaggaattgggcacaggaaggatgcggaatgagtccaggactcagctggattccttctcagagcttcagcctttcccagagctgaggcagtgtctgcccctggccaaggttcagctaagtgtggccccagctgatggctctatgtggcctgaggaggcgccagtgacctttctttacaagaatccctttatcctagcctgaaggcgagcgtctgggaggcagggggtaaggagcactttggaggctggattactgctgggaaggcagctggcggaggcaggggggccatgtgcactggctctgggtggggcccccattgggcctgggccccatgctgccaaacagctggccttggcgtggggtcagagagcatggcccctccccaggtgtccagaggcaagcatcctcagggacacagggctggccaggcagaggcagaacctgacctgtccctccccatctgctctgggctggcaccacatgggacctcttgtctcccagtggtggaaggggtctttcatgccccacatgagaaatggaaggaagagcctgctccagcctatgcagtgggggttggggaggggtggtcagcccagagtcagagctcactcccttcctgtgccctcgcctctgtcccctccgcaactcctaggtggcccaggaaactcagcagggcaggaggaagtgggagccatgaggaggggaccaggaggtgcctgtggttaacaggaaggggggtcaagcagtggctctgggtgtgggtgggaccctgccgcaggcaaggcggcccccaggcgctgccaccacggggcggtgtcttagctgtggtctcaggagtgcagcagctgcacgacaccatcacggccacctgcagtccccgagagccccacatgtccatctggcctgggcattctgcagctttgggcacaggcaggggtgggagtctggggctagcctggaggagggtgctggggtctcaggagaggacctggaaggggcacccatccctgcctgcctgggcatccacctccttgcccagaggagggcctcaggagtggcctctgcctggctgccacggttctggctctctgtcccccttactctctggccctccagaacgttccccggcccttagcagctccagcgtctctcaagcccccttccagccatgagcgaattcattctagagatgcagagttggcccctgtgtgtgccccgcccaactgggtccagaggtgcttgagtagtcaaggaagtcagctgggccagtgtccccttggcggaagcacggccctgcccagcccagcacagctcagttcaggggaacccacccaggccaaagcgaagcaccgccagggcgcacttcaggtccaaagagacgcacgggggcggtcagctgctcctgaggactgacagctggggaaacgttcttggacaaaggggctgggtctccgaggaagaaggaggagccccctgcagagggccaggcagaagcaaaggcccagctcgggggctggggtgcagagaaaggggggccttccatgggccgagcttctcccgcgtcccctctccagcctagtgggaccacaagtgggattgtcagctctcccaggctggtggttggccctgcccacgggcctgcacccggcacccacacttgcccctcccccaccctcagcccctctctgggtcacaggatcacccccaccccacccccaagtcccagcagacctctgaggagacccactcacgcagctgaagcccagcccctgtgggctccccggcccatcccgccacatggcagaggaggctctgctcagagcacattctttcggtggacagcgggtctccaccccaacccaagtccaaagtgttcccttttggtgcctccctccctcctttccaaaaggcccaaagaggcacaaagtcatgactgagaagagcggctgggcagggcacccacctgggatgggctagggaccagcagcaggaggaggggctggggggccagccctgctcaccttgagccttcacaggctggggagtgggcctggctcactctggactaggaagagtggcccccaccctagtcactaggtctgcccaacagctgaacaaaacctggcgctcccccaggcaaggggcacttggagaattggttcctggggacacaggcaacccccaacaatggaagtcgtgcctgctgggtggccagcggatggctacagtggcaaacacagggcccctggaggagagcaggaggcccttcctgtcctgtctggtgacagcaggaggcccacgaggcgacccagcatctgatgtgacattggaagaggacatttccttaggccccccaggaatggaagctgcagaagagggttgtggctgacttggacttggggtcaggtggtggcttccgggcccacctgtcgcctgcctgtttctgagctccaggcctgcacccttccctcctccgaggcttgggcagagctgggcactggggaccacatacatctagtgaccccccccccaccaagccccgccttcttccccagccactccctcttccctggcctcctggcctggcctccagaatgagcctccttaggggaccttggggtctcggggctggggccccaccaggcagaaacgtgacctttcagactggaattgcccacacttcctctttggccccagggacagtctcaccgtgggaggggcactctggggctccttcctcccaagccccacagcgtcccctcctgcacttggacttcaggactgtgggggcaggatgagatcacagctggagatggacgcagcaccatgcacagtggcggaaaagggtttggcaactgcaggctgaggcccagctgtgtacagatgagcagagagtcattgggggctctggggtgaaggtgctgctggtgtcagggacaggccagccccccagggcatggaggccgctgagagcgaccgccacatcaaccttgggtggcctcaggcaggcagaatcctgagggctgggcctaaagggtccacctgaagtccttggtggccggagcgtggcccggggcttccccgcaggcagtgcagggcagtggcgataacaggccttttgcatttcccagtttgagtgggatcccaggtcgctgctgcctcagccagcgtgtctgtttccttgtcgacccatccttctttccttctctccctcccctcatggggggttcccatcaggggctgtgctccctggggctcccagccttcagctttcactgcagtggatgaaagtcctaccagcaccaagagggcctcattcctcagcagctcacaccctgcagatgccaactttccattattccttaggcaacgcctggagtggcagatggccgggggatgggaacctcactagggttccagtggaaatcagccctaaaactaaccctgctcacctctctgaggaccctgccctgtcctggagacctcaggaacagtggggaggcaggcaggcaccccaggcacctccaatggggagtgcctgctgcacaaccaccgagggtctccaccctggagccgtgcgacacgacaggcagcctgtgtgaatccaaacacatgggaagcacctaccgcgtgtccctgccttggctgctgggacagagccatgatcagaccccaccacccctcacctgcgctgcatctggtgggagaagtgtgtgcgaagaacaaagaagtgcaatgtggagccctccaaggactcccagtgctacgtggagaatctgaatcgactcccagagtggccaagcctccgggaagtgacattgaagctgacagtggaatttgaggaggaccgggccatgtggagatggtgggcgggcacattcagcaggaatgggaacataaaggggccagtgtggctggagcagagtgggcgacagagtgggctggggaatggggtggcgggagggcttggggaacagggacgggatgagactggatttgttctaaatgccatatggagccactggggagatgtggcctttaaaatgaacaaaacacctccccaccaggtgaccatttgggggcactcagcaggcacctctcagctgtagggcatcaggaagtccaagggatggggggctccagaagggctccacagaccaggatgccttgtgatgagagctgccgcccaccctgtctgagcgggtcagaggtggtctgcagggcccggggcactggacactggtctggggttgttggcacacagagtgatagtccctggtacacacctgtattgcatttggattggtgagtgtctgttccatatcagtgtttcagacattatttgaataccacctcagatgtgtctgagtgtgaggtgaatgggaaggaaggtggaatcaggcaggtcagctgactggctggagagcttcaaggagggatagaggggtggcaggtgggtgaatggatggatggatggatggatggatggatggatggatggatgcctgaaagggagggagggtgggtggatgggtgggtggatggatggatggatggatggatggatggatggatggatggatggacaggaggatggatggatgcctgaaagggagggagggtgggtggatgggtggatggatggatggatggatggtttggtgggtggatggatagatgagtgggtagatggatggatggatggatgaatgaatgggtaggtggatggatggatggatggatgggaagatggtggatggatggatggatgcctgggaggatggatggatggatggatggatggatggatggatagatgaatgggtgggtgggtggatggatggatgggaggacagtagatggatggatgaatagacgggtggatgaatagacagatggatgaatgggtggatggatggatgaatgggtggatggatggatggatggatgaatgaatgggtgggtggatggatggatggatggatgaatgggtggatggatggatagatgggaggatggtagatggatggatggatggacgaatgggtggatggatgaatgggtagatggatggatggatggattgatggatagatgggatgacagtagatggatggatggatggatggatgaatgggtgggtgggtggatggatggatggatggatgcctggaagggagatgtatgtatgtatagatggagggatacaagggagcgggagactggtgtatagatgagactggtgtatagatgagtggatggtggcactcacagactaagaagtcccactggctgtcattggtgctgggagaaggtatgtggggtatctgagcagaaaggtaccaagatcccctatggcctttctaccttggcccaggtggaactggagcagacagccagacagggcagctgaggctaggttttgagcccctctccctgccccaggaggttccaagtgagggagacctacctgggaatcgctgtcaccacactgcctgggacattccggggctctctgtgggtcctgagagcaggatcgctgctcacttaccttggctgcctggtgcccagcccagcctgggtgctcagaaaatctcagctgtctgagtaagcccggcctccgctcagctgctggttcccatcctgagctgcacctgggcaagtaggacgtgtttgttgtgattgacaagtaggggcaggacttcccatctgcctgcttccctgcggcaggttggctgagccaagctgagacactgagtgggcagacactcagcggctgggttttaggatcggttccacctggcttaaggacggcattgctgattgttagctctgtgacctgggccaaaacgccagcctctctgaagccagctgccctgtgtgtaagatggccaaggtcatgagccgagccaggggccaggtgagggaggggctggcccagcctggctgcatccttggagcccctccccactctgacttcaggactgggggcacagagggggctctggggtggtggacagaagcccccaggaccacagacaccctgggcccccagcccactcctgaagccacagcaggaaagtctctgtgtgtctgaggccccccccagcaaagcccaggaccatgggagaaatcgaggcctttgtcccgggcttggcaggatgccactggcctgccctgaggcagcaggaagcagccccagaaaattgggaaaggaggaaaattgaccagtagtttttaaggagctcgcccttgggaagtggacacaagatgagaagctggaggggatgctctgccaacccttgtcaggtcacgattacaggtcgaggccttccactccctgagccatgattttctcatctgtaaaatgggctgagacctcagtggatctggcgccgtcaacttcaagtgcctgcaaaggcgtgactgcaatcagttaccctctgcttggcccagcactactaggtgtagggctggtggggagcaggacagaggggaccgcctgttgtcctctctccttccaggggaggaaacaagaaactcgcttctgaacccacaggggaaaggcaggtctgccagtgggcggggctgggagagcgaggcaggtgggtgtcagggcctggctgtggggcctccctcttttgtgaagcagcaaggaagctcccactgggaatgcaacgtcttgggctgggcgtggacgcaggtgtgcctggctgtgagcgcccagagctccctctcttgctggggtgcatgtgggtgcaactgaaactgttggggcacccaagcttcaggcgggcttaaccagaggcgaggcgctcctgggacccttagatggatggcaggccaggctcccggactgcccaacaccgtgccagccactccctggtgctcagcggccacctggtctcacccccgtgcatcttctccatggaagctctagacccctccccaccacaaagtgctgtcacgtgggagggaaatgcgggagggaaaacctgtgtctacacgtgggtctgcctggctgcagccagggtctcacagaacctggggtgggggttctgagaaggacatcttccgagggtggtgatgagcctctctgaccagggctccgtccagccctactgcccggcgtggaaagggctggcaccagccaaagccattcgcctgagctgggctgtcctggctgaccacccaccaccaggctcccagggcccaggccctcctcaccctgcctcagaagtcccctgagagggggacttcttagccaggggcacccccaccatgtggctctgaagccccttccggggcggtgacctcctgctgcccctccttccttccttccagaagcccccgagcgcccacagcatgaaggaggaggccttcctccggcgccgcttctccctgtgtccaccttcctccacccctcagaaagtcgacccccggaagctcacccggaacttgctcctcagcggagacaatgagctctacccactcagcccaggtaagtgccggccgtgggcagggcaacctggccctcagcttgggcccggtggggtgaccccgggcggcccaacccctctgtgccccttgaggtccacagcttccatgctggggactgtgtgggtttcatgatcaaacggtttgtagcttggtagagtgccaggtaatacggcttcttggcttgacctgcggggccaggtgaagcccatctggttgaggagggggttcccacagcccaggctttgggagttatggagtgcagtcatcccaaagtcagcccaggctttgggagttatggagtgcaggctccagggacaggtggcctgagccccagtcctggcagggtaaccccaggccagctacttgacctctctaggcctcagttgactgatctataaaatgggacaatattagtacctactcccagctatacatgggtcctgggctctgagaggggacagctggaaccaggcctgccttcgtgcaattgtagataaagcacccagcacacagactcagaacctctgcccgccaatgctgccactctccaggcccctccctggcacctaactatgcacaacccctgccccagccaaggctgagctgtgactgctgtcccccagaaaacccagcccttcctcccctgttcccctgagagtaggaggtaggggcaggcacctgcctgggggacctctccccagctctgccccctctcctcccactgcctgctttggggctgaggaagtgggagccccagccctgcctggccatggtcatctcatctgccctggggggagtgggagagcattgggcggatccaccacccaggctcgaggggcgtgtggtcgcagccaaagtcccatccaatagatggaaaaacggagtcccagcgtagaggtggccttgctgaaggtgctatggcaggcaggggcactcgacacccggcaaggtaaatcctacaccttttattctctgctgtcacgttcaccctggccggaggcttagaagcacttgcagagtcaggggtggggaggggaagggctgggtcccagctgctggtcagtttcagagggactcggaccaactagcaactggcccaggcggtgcagaagacgtgctgggaagggccttttccgaggaatggaggcggtaggtcccaggccaagggagtggggtgggtgtggacaggctgtgaggagaaggaccagtgctgacttccccctgcccagggcacctgcaccctatccctttgagtggtccaagggccccagcctttgagtcctcccggccaggaggcagcatccacatggaaagtagtttgctggcggccacaggccaagcccctagaactatatgagaaagtgccagagggaagagcgctcctgctagcctccccccagcactccgggtcaggggcgtagcactctgcagatggggaagcagaggctcccaggtgggggagcagccactgccggccagggtcagcgatgttctgtgactgtgagtggccacggtccaggacctttggacagaaccacttcctcaggccaccgtcctggcttttccgttcttcgtccccatccagtccctgcccagggctgtcagggaaggacggctatagaccccaggccttccagctggtctgtggcgtctgtccacgcacccagcctgttgctggcctgtcgcctgtggccttggcaggatggggttcactccagcccccagcccctccgagtctcagtgtcagggaccggggcagtcaaccctcgcccaccagccacaggaagcagcgggagcggccctgctgggcagacctcaggcttcccctgcagccatcccctccttcctcctgtccagaaatcgtaccttgggaaactggcaccaaagcaaacagagccgggggaggggaggccatttcccaaaggagcaaacgcagacacctcaggtctccctcctttgcctctccctccttacccagcctgccagggtgggatggcagacagggctgaccacctcccagcaagagcccagcacgcaggggccggcagcatccagccagggggatgcacagtccaggggccccaaacctgccatgtgtctttgagactggatgtcacattctttttctgaaaactggggactctggccttcacagacccccaattgcacactacagcaggcccaggatgccggttcctaccagctcctgtcccagcttcctccctgtaggtcctggaggccctgccagttctcctggcacactcctcccacagtgacgcttgctggcgtttattacacctctcaggcagtgtcctgttcctgccaccacctccggctgacttcctgcccctcccaggtcatccgcacccacgcttcgcctgcctcacaccaggcagcggcctgagaagcctggccacgccaccatgcctgggtcctcactcccactgctctcttgcagggaaggacatggagcccaacggcccgtcgctgcccagggatgaagggcccccgaccccaagctctgccacgaaggtgccaccggtaagagcctgggtataggaggatccatgagccagagcctggctctggggacagcaggaaacggctggggaaaaggacagcagggcgtccagctgagcctgccattccagcctgttcgggggaaacagctcccaatcctagactgtgctgctccgggagggctgctggtggatatttgggctgttttcaccatatagctgtcatgaaaaatgcttccgtgaacatgtgtgcacgtgtatttgactatcagttttcagttctctcaggtataaacctagagtaattggaattgctaggtcacatggtaattccaggataatatagaactctcaaaattgtctgtttaacttttggaggaactgccaaactcctttcccagcggctgcaccatcttacatggccacccacagtgcacaagggctccagttcctcacatcctcaccaacgcttgctattttctgatttgttgttttcttttttcctttttctttgaaatggagtctccctctgtcacccaggctggagtgcagtggcacaatctcagctcactgcaagctccgcctcccaagttcacgccattctcctgcctcagcctcccgaggagctgggactacaggtgcccgccaccacggccggccaattttttgtatttttttttttttttttttgagacggagtctcgctctgtcacccaggctggagtgcagtggcgcgatctcggctcactgcaagctccgcctcccgggttcacaccatgcccctgcctcagcctcccgagtagctgggactacaggcgcccgccaccacgcccggccaatttttttgtatttttagtagagacgggtttcaccgtgttagccaggatggccttgatctcctgacctcatgatccacccgcctcggcctcccaaagtgctgggattacaggcgtgatttgttcttttttgtgttatttttatagctatcctagcgggtatgaagtagcatctcactgcggcttcagtttgcatctctaatgacggataacattgaacatcttcgtgcacccattagccatttgtatgtcctgtttggagaaatgtctattccagttatttgtccatttttggaatgggttgtttgcctttttgttgctgagctgcaagagttctttatgcattttggatactaggtccttatccgatacatgatttgcgactacttcctcccattccgtaggtggttctaaattatatttttaaggaattttcataggttgcaaagttctggtcagcctgaagttcacagttctgagcagcacttctcatctctcaggtgcctccttatggcactgtcactgatgcacagtagcactgaggagtgagcagaggacctggcatgcctggacggggtacccacctggcctgcaggagggaggagtgggcaggcactctctgcagtgctggggctgcaggggctgcagtgaccagacccaagggtcctgcccagttggggagcaggggttgcaagtgctccatcccatgccatgcggtcttgcctctctcttcccctgttgcctcaaatacacacagccccattcagctgcatctagtgggaagctgggcagaggggaattggcagcaggttcatgcgtccatccatccatccatccatccatccattcatccattcattcattcgagatgcttgctaagcccccagctgccggtgtgaatgggcagtagggtagaaccctcccctggtggaagccacagacaatcatcagttcaccacagaaacggctgcgtggttgtattgcaaaagtcctgggcgggccaagggtggtgtgtgtcaccaggacctgtgccagcagggatatgagctgtcctgcttctggggaagcagctcagggagcctgagaaagaaaggagcaggggctacccagccacagggaaaagcattccaggctgggaacaccatgtgccaaggtaactaagggcatcatgaacaagatcctggctcaggggactcccaggagggcaacttaggacaccttctctgccagcctgggtccctggaggcctgtcaactggccagggtccagcatatgcctcgtcactcagatctgcctcctccttatcactcatcgtcagcccaaagactgcttccaagtcagagccccccaggcaccccatcttgtgccgttttcttcttgtgatcctgaatgctcttacttggctaagaaagtgccacaatggagcaacactgcctgggttcagtcccagctcagctccttattagctgtgtgaccttgggcaggtttctgaacctctctgtgcgtaggctcttcctctgtacaatgctgagaataacaacgatgacctgagctgtgggatctaacgtgcttacatccatgcacagaacgcagaaccgcagcgctcacctgacccctggctcctcccgcctctgcgtgctggtggctggtctgcctctccctgaaagagcaggacactggcatctttactttctaacctcagtgcctaaggccaagcctggtgcccagtgctgccaggaccgccagtccgtggaacggttccatgccctgccccttgctagctctccacctctctgtgccttgatttcccaggcacagaaataaaatagggacaataaccggccccaccttatgcatggctggagaatgagggggatgaatacaggcagcacccgaacaggacctggtgccccagcagacaaggctttagctctgtacttagcaccatcatgattggggtgggggcagtccccagcgcccagggcttctagccaggagaaggcctgagggaggctttcctcgccctagaggctccgctggaaagtgctgagcacccgcagacgcccagccagagcagggcagggcgggcacgctttctctggaaaaggccagacggcatttaggccccgccgcggcgcaggctccgttccaggtactcagcacagccatccaagcacgagaacagccacagacaacgcctgccggatcgcctggccatgtgccaagaaaaccttatttatggactcctcatttgaatttcatataattttcacatctcacaaattattcttgtgattttttttcaactgattaaaactgtggaagctgttcttagcttgcagaccacgcggaaggaggcagcaggcaggattcgggtcgtagcttgctgtccccagcctgcaggctttagacctggttctgtgtcccaactcgccccctaccctgcctcaggttccccatctgtagaagaaccgtggcccccttctgcctccaagatattgggactgccgccctgggcccgtgcagtcagccacatgctggggtcaggttcggacctggacagtgacctctgcccacggctcccaggggatggggtgggcacccccactgcacaccccccaccagtacattggccctgcccagagctgggcacatgcaatggccaaggagcagccatgctgggtaccgtagggggaagacaaggcagggaagctgttcttttgggtggatgcagggctggtccccagagacccagcgtgagtgcttgttgccaccatctcatggccgccgccgagctcctcttctgcgaactccaccctctggcaccctgactgctttcctcagcggcctcccaggtgtcccctcaaagacggctgtccctcagggctcagtcagacccgtaggaagtcagccctgaaccctgatgtccccacatttccctccttcctgaccaccctgccccatcccagcatgtgccccggggaggatgggtcccctcctgtcactggcgtgtgcccatggagggtctctcgtcagccacccttgttcttccatccccccatggcagccccggaagtgctggtgggggggatggagggtgccaggcgggaaacgagtggagcgcccttctctgacttctgccctcatatccttggcatcaggccaacctgggctcctagccctgggccggcccctgtgccctgtcccgcatacccacctctctctttcaggcagagtacaggctgtgcaacgggtcagacaaggaatgtgtgtcccccaccgccagggtcaccaagaaggagactctcaaggtgagcccgggcccggggagggtgcagcagtgtcactgtcagaccgacggccacctgagccagggaggtcaccctccccacctgtcaaaaggaggggacaaaccgcacctggtcgcctccacaccccctacttcctcctacttcctctcctgcccctgcccctggacccatccctgggctggacggtgggaggagctggggcagctcggtgccttctcccatgacccaccgcgggtgccccgggcccaggcgcagaaggagaactaccggcaggagaagaagcgcgccacacggcagctgctcagcgctctgacagaccccagcgtggtcatcatggctgacagcctgaaggtaggtgatgcccggcctccggccacccaggacacgggtcagcgtgctgctgccataacaaaggaccataaaccaggtggcctgaaacgatggaaattcacttccctgcatctagccgttatcactgcagcctctgctccttcctcatgaggcctttccttatccacctgtctctccccctttttataaggacaccagtggtaggaattagggccaccttactccagtgtagccccatcttcacctgattatgtctgcaaagaccccatttccgaataaggtggggcctggccagtgggcggagggcgctggggagggagacattgctctggcttctgggagaggaccccacatcagggccgggtgtcctgtgttcagacctcacggagaccgtggccattcactcgcctctgagcctccatttccccttgtgtacagtggaggtaaaactgcccaactccgaggctgctgggcaacgcataccagataagtgtgcccagccctggtgtctgcagagcccaggcccatgtaggctccttctacccgcataccaaaatgatgaatcaaaagttaggtgcaaaagtgagtatttagaatgagaaaagaagacaactactttcagaatttacagagctgccaggccgggtgcagtggctcacacctgtaatcccaacactttgggaggctaaggcgggtggatcacctgaggtcaggagtttgagaccagcctgtccaaaatggcaaaaccccgtctctactaaaaatacagaaattagccaggcatggtggcgggcgcctgtaatcccagctactcgggcggctgaggcaggagaatcgcttgaacctgggaggcagagtttgcagcgagccaagatagcaccactgcacctccagcctgggcaacagagactctgtctcaaaaaaaaaaaaaaaaagaatctacaaagctgccagttacaagtcacaccactcattgctggttcctccctgaggcccttgaccttgaacttgacccacgtgaccctcacaagtaaatctgtccctgctgccacgtatttctttgcattcaccataacatatgggctccttttaaaaactgaacaaggaccctgccctgagttccactctgagtcctggggcaccgcttgccgtggcttggcccctgctcgggtacacgatagacacaggacatcaccccagggagtgagggtgaggaaggggtgagttccgaactggtgtgggggagtgagggaggggaagggcccctcggcagcccaccctggtctgtgcctggctccccgccaagccatcaagatgccccagggatggcggccccagagggtgggcatcgacgccagcatcctccctgcagatccgcggcaccctgaagagctggaccaagctgtggtgcgtgctgaagccgggggtgctgctcatctacaagacgcccaaggtgggccagtgggtgggcacggtgctgctgcactgctgcgagctcatcgagcggccctccaagaaggacggcttctgcttcaagctcttccacccgctggatcagtccgtctgggccgtgaaggtgctgcggaggggtggggttgaagacagaggccccgtagggccaaggggctcattcctagggccctggtggagggtggagccaaccagctgaatggcccccttggggccttgagcaggtgtctcaccttctctgagccccacatgcggccaggggatcagatatggccactggtgctccatgtgaagcacacagtaggctgcaaggaggtggcatcaaggtcaccccagcccctcacccagctgctgtccaggagggacaacagtggctgctccccaggggtggccgaggaacagcgcccagccctcacccctcctaacccggggctgccctgccagctctaacgggtgggaaaccagagaaaccctgaacacctggttacatttggatttcagagaaacatcagagttctttcatgctagtatgaccccagtcatgtatgggaaatacttacaccaaaaagctactcatggtttctctgggattcgaacatcattgggcatcctggatgtgcctttgctgattctggacagcccaagtcaggaggctcagagctggaaagctgagggcagagctgccagctaagaaaggggacagagctcccccacctacccgcctctctgcagccaagtgtctacctggccaggtgcctggccccacctggtggccctgtggccctgggggtgtccaggtggtcccaggtgtggatccgcatggttctgcctgacctatctgtgcagctggccctgggtgttgcctcgggtgacacccagatctctctctctccagggccccaaaggtgagagcgtgggctccatcacacagcccctgcccagcagctacctgatcttcagggccgcctccgagtcagatggtgagtccctgccagcttgcgcatctccccagtgcccccacctgaagtgggcccccttttgaggttgtagcccaggtacaggtggccccagttcagtcccttctactgtctgggggcagcctgaagtctggccaggatgagcccggctcggagtcaggcctacactcacagagcccccatgcctagcctcagttttcccatgagtaaaatgtgacattaaaataccacctgtcaaaggccaggcgtggtggctcacacctgtaatcccagcactttggcaagccaaggcgggtagattacttgaggtcaggagttcaggaccagcctggccaacatggtgaaaccccgactctactaaaaaatacaaaaattagccaggcgtggtggcaggcgcctgtaatcccagctactcgggagactgagacaggaggattgcttgaacccgggagatggaagttgcagcaatccaagatggtgccattgcactccagcctgggtgacaagagcaaaagtccgtcttaaagaaaaaaaaaaaaccacctgtcaccccaatgttatgagaacccagtgaccttataaaagcacccatataacaattactgagctccaaccacatgccagtgtgaaccccaaacatctgagacaggtctcagttaatttagaaagtttattttgccaggccgggtgcagtggctcacacctgtaatcccagcactttgggaggctgaggcaggtggatcacctgaggtcaggagtttgaccagcctgatcaacatggcgaaaccctgtctctactaaaaatacaaaattagctgggcatggtggtgggtgcccgtgatcccaactactcaggaggctgaggcaagagaatcccttgaacccaggaggcagagtttgcagtgagccaagatcacaccactgcactccagcctgggtgacagagggagactccatctcaaaaaaaaaaaaaaaaaaatagtttattttgccaaggttgaggccgtgcctgtgacacagcctcaggaggttctgatgacttgtgcccaaggtggtccgagcacagtttggttttatacattttagggagatatgagacatcagtcaacacatgcaagatgaacattggttcggtctggaaaggcgggacaatcaaagccgggagggggcttccaggtcataggtagattagagacaaatggttgcattcctttgagtttctgatgagcctctccaaaggagacaatcagatctgcatttatctcagtgagcagaggggtgacttggaatagaatgggggggcaggttggcccctagcagtgcccagcttgacttttccctttagcttcgtgattttgggagcccaagatattttcctttcacatttcccccctttttaaaaatcttttggagaaagcattttagaagaaaacgagtctctggtctcaggttccacctgatctctcatggctaggatggtttattcctacacaggtaggtcccaagttattaggaaagctcattttcagaaggctgtgaagtctcatgtcctatgaagagaaaatagtaggaggaaggcagaaaaacaacaacaaacaaaagaacaatcctgggaaattggtataggccacattactctgaagtccatacatcagtaggcaggcaagaaagtggcttatgtatgtaagtaggttgctgttattttcttctgaagtttaagttgtctagtttcagtttgcagggctttaagaaagcacagcttagtcttcagcgactccaaattaggaaaaatgggaaaaaaatgaaggaaaaaaattgaaaacattattttgaagacctatagccaacaaaaattaggatttcatccaaagtgcagaaaataacaaaaattgaaaaacattagggaagagtagaatctaacaacagctgtactatagtttttgaaacataattttttctctccagtttcccattttaactaaggacaaattatggtaggactggtttgctttattatacttggactaattatttatatacagtgcagcaagagtaattagtttttacataggcttttaaattgtctttgatggaactttgttccatagaaagaatctcagataagacttttttaaagctgagcccagtcatggacttgtaccattaaacacctataagttgggcgaattattatcttcttgaggttccaagataaatttggagctcctgggcctgtcagaaagtgacattctttacttaccacaggtcaggaaccctgtacagggactgtgtagatgaggtatgaggccagtttttccaaggggctttcattggttccataagtcaagtttgagtccttaaaggaaagcacatcattccaggcaaagccttggtaaaataaccaatttctccgattgtgtcctgttacaaatgaaaacagattcttactgcacttatgcaaataactgtattgtcataagttacgaatactcacagatagttttcaaattctgtaaaaattaggtagagagaaacaaatatgctccaaattttgttcacaggagtatactcaattgttaaaagctgtaaatagcttaaagttttcttgactctgaaaaacaaaagaaaggatccacaatgttttaagcaaaaagtcaaaaagattacttcacacttcttttttttttttttttttgtgatggagtctcactctgttgcccagactggagtgcagtggcgccatctcggctcactgcaacctccacctcctgggttcaagcaattctcctgcctcagcctcccaagtagctgggattataggcatccgccaccacacccagctaatttttgtacttttagtagagatggggtttcaccatgttggccaggctggtctcgaactcctgacctcaagtgatccgcccaccatggcctcccaaagtgctgggattacaggcgtgagccaccacacctggcaattacttcacacttctattagtttagtccatgcagttaattcctgttctgcttcaaatttatgaacatttcagctctccatgaaccctgaaagtttttcctctattctgatgtcacagtctctaaagttatcagaaaccagcattcaagagcacctgttagagttttacagctgattataaaaccaccttctaaagaggaccaaaacaagacaatgattgcttgtggatgataaaaagttttagggcagccatactcaaagacacaattgacaaggaaattgttacctctgtggcacaaaataatttaacataacaattataatcattactgataatgtatattaggtcatatcagaattataggagtttcctataattttggaacacataccagtaacatatttgtacaaatatagcccaaagaagaccaaataccattttatatttgacactgcttcctgtataattttttataccaaataagccaaatatgtcatttttggactttagggaacctattaataatatcttcaaggattaggttagaaaaagacataatttataatttgattttggaaagtttgtcaaattttaaaggtttaaaacacttgatattacaaagtaggattacaagtcattgtaaaataattcactcatttgaacaaagtgatacctcaaggatttaaaaaaaaaaaaaaggcaaaagccttcattctttgagacaggagacttagttttccaaacaataagccctaataacatcatgaagccaattaaattgttttccaaaattccaatctataaaattttcatcttgatcataagatataacttccataagcctttataacctttattaaggagtcagttattgtttcaagaaaaccttgttaatctgacacaggggcccatatgctagtcttgcatcagtgtgcctttgacattaatgattaatttatagaggaactgaacttactttatctctcaaagtcagcccttacaatctcacatgtctatctcttctgggatagtctctgggccttgaggagttgaacagctttaatttctgtgtctcaggaatgtggtttattttgattggcatcttctaccgggcctgaagatgaagctttaattgctgtcagtgtttaaaatttagcaggacttggtgttctttttagacccatgagtcaaatccctgtaactcaatgtcgcaaggactttaaaagcacatacaagaagatataaggacggaataaccttgatttaaaaaaaattttaatatctgtttttcctaagcaaaccaaacttaataataatggcataggaattattttgataaaacataaaatctgttaggccacttaccaaaaggcaaaagcaaataccttctgcagtgtatagaatattatgttagaagaaaacattttctttaagaaaacattgttagcatcaggccacacacacacaaaaaaacagaacctgaggaggaaaacaaaacttatatgagctgaaaatgagttgaagggaagtgttactattttgttccttttaagagggaagagaaaactgaaactggcaagatgcaatgaaagttgaactttgggttaaaattaaaaaattaaaatatcttataattgattaagagtaaatcaacctcttaagaaaatgtcggccaggtgcggtggctcatgcctgtaatcccagcacttttgggaggccgaggcaggaggatcacgaagtcaggagatcaagaccatcctggctaacatggtgaaaccccatctctactaaaaatacaaaaaaaaattagccaggcgtggtggcgggcgcctgtagtcccagctactcaggaggctggggcaggagaatggcgtgaacccaggaggtggagcttgcagtgagccaagatcacgccactgcactccagcctgggcaacagagcgagactctgtctaaaaaaaaaaaaaaaaaaaaaaaaaatcattgttctaaccaattctttagtctataactgtttttttacatcaaacccaatctctagaaagaccattataatttccctttagtcatagacaacttgatcatataaaagggtttttttttaatagatcctcttattgtgacttccatagaccattcatgccacgcttggactttctggtttgtcctgaacatccctctttcttaaacaaccagtcattttactctaggactaaatttaccatacaagattctttctcatatgaaattatttctctttaagctttcttactctccaccaaaaaacacttttttataactttctttacatctcttttactcttttatttcctggttccttttaccttgttttatacatgatctttaaataagctttgaattaggcaaaaattgttcacctttttcaaaaggacatgctttcttttagaaagcatattttcctacaaatatatttttattggaaaatatccaaatagtgaaatatcttatttaatctaactttaaattctaaattatgatgaatttgtctacaagtatttgtcctattacatttacctaattattttaatcatttacctagattatttataaaaactgcaattgtcattatttaaattatggaaacaccattgcaaaattataactgagacagtgaaagagatttgacctaactgactccatcttgtttctaaccttcaagctatccttgttcattcctgggcataggtcaaactaactttgggaggaacttagtttatagtttacctgaaacaaagactataacagtctttctcaaaatgaaccttactgcctgtggactagactacctaaagccaccagattagaagttatggtaatcttactaaatttaagatgtagctatttttattaaaccaatataaatttttttttttttgagacggagtcttgctctagtctcccaggctggagtgcagtggtgcgatcttggctcactgttacctctgcctcccaggtcaagcaattctcctgcctcagcctcacgagtagctgggattacaggtgcctgccaacacacctggctaatttttgtatttttagtagagatggggtttcactatgttggccagactggtcttgaactcctgactttgtgatccacccacctcagcctcccaaagtgctgagattacaggcattattaaagattacacaagcaaagatcattctgtcttgggctgggtttatagtttcgtaactcctatgccaaattttgacacctcatggtatttggcagggataagtatgaaattgcttgattaataaatgcaaacaaaaatatatgctggcaattcttaagacatttctaatattactttaccaataattttaaagctagcttatttattaaagattttatttaagttacataaacttgaaaaagcatttgacttgtcttttcttttttcctgatcaagtatttgattcaagtgcatttactttcttaagccaatcaattagagcccttttatatattttcagtagtgaaacattgtgtacacgacacataaatacatagacatattaggcatggcaatagaagtacatctcataggtttataaaaatttttttttcctgtcttagactttcagattcttgataacctgtttcacaaccctaggcaattgtcagctaaatagccttaaatttgcatattaagggaaacaactcaggtgaaaatcaaatagcaaaatttgcataaggtacagagagaaaaagtctggtggtgctagagggagactaaagatggatgccaaatcaaacaaaattatagaaatctatcataggattgcataaggagaccaattttatgtagtagggactacctatcatttaactggatctctgagctctgggaagagcccacactgaatcctaggtctccagaaagggagaattatcatgaggttagaccacgtgatgcttttatagtgcacttacaaattttttttaaacaaagacatttctaagtgtctaaaccacactcttccttaaaagcccaagagtaaccactgttgcaataactactttagtcaaaaaaaaaaaaaaaaagaaaagaaaacacaaaacaggttacacaatacaaaagtaagcagtttaagagctgagacaaacttgtctgtttacattcttggggtttcataagaaaaaacaagtttctcccccaaggggagtctggcaccctctccattttctttaaggaaccccaggctactataaactattttaggtcccccatgcggcagaaggtgcaagagaaaggagagacagcagaagtaaatcaagaaacagaattcagtcaactgagaagaaaaaacccttttgctcaaaaaaagacaaggtcctaggagaaaaacaaaaacagaaacatgaaggtctcttaaatacaaacacacacatatgcgcacacacacacatgcacacacacatatgcacacacacatgcacacacacatgcacacacacatacacatgcacacacatgcgcgcacacatacacacacatgcacacacatgcgcgcacacacacacacatgcacacacatgcgcgcacacatatgcacacacacacacacagcttggatgttagcttttcattaaactgacttttaaccattgagcttctttgaaaaaatctttttaaatctcattccatatttcaactaggacaaatttcaacgaggacacagaagtacagtcattactctttcagtttggcctagctagtgaaaatgtggccttgttatatgaataaagccccttagtagtcaaaatcaaaatctttcctcttttttttttccttttgctggccgtttttctccccccatcacgccaccattgtgtgtgggggtggggaggggaattcagccacttcagaggccttgttccccataatttggaacttccttcagatttgatcaagccagatagaggtcaatgggaaaaagaccaaaacaacaaaaacagaaacaatcaacaacaaaaaaacagttaagcgaaacaaacaatcgcacaacttacgtgatcactgagtgctctaatggtaaggagaaattaagaccagctggttgttaatcttaactttagctaagacaaaccacaattcagttacttccctagggatgggtctcaggctgaaaactcagatctccaccatcctgggagcaggaaaaaaaaaaaattcatcttccctgttggaagcaagctcgaactccataaaggagttacctgccttccatcgtcatggaagcagggaaaacttgccttccttgtatcggaagcaagtaaaactccaaaaagagaagttgtaaaacaaaataaactttagatctcgaccaaattttgagagatcagggattctctgtggcagggggtgggggtggggcacggggggaggtgcttccaggcctcagcaaattgtcttattggtttgagccataaagttagctcaagctggtaccaagcaccaataggagacttgtgaaaagtcaggggcatctccactcagaatccttcagtggttaccaaaatgtttgaaccctgaaaatctgagacaggtctcagttaatttagaaagtttattttgccaaggttgaagacgcctacctgtgacacagcctcaggaggtcctgacgatgtgcccagggtggtcagagcacagtttggttttagggagacatgagacattaaccaacatatgtaagatgaacattggtttggtctggaaaggcgggacaacttcaagcggggaggggcttccaggtcataggtagataagagaaagatggttgcatttttttgagtttctgatgagcttctccaaaggagacaatgagatatgcatttatctcagtgagcagaggggtgacttggaatagaatgggaggcaggttggccctaagcagttcccagcttgggtttttccctttagcttagtgatttgaggggcccaagattttcctttcacaccaggcaccattgaaacaacaggttctactgttatcatccacattagacaggtcaggaaactgaggcacaggcaaactgccagcaagaaagtgctagaacgagaatttccctgactcccaaatgcattgcacgctgttgctgttccctgagtggccgctcaggcagctgtgactgcgatgatcctccacctggagggattccctcttggccgttcctccctctaacctgaggttggggccctaccccacctcgccctccagtggctgctctgggtaaatgcggttgctccacctcctctaaccccagggtgatgcctcccagagcagtggggtgaagggctcccatcccgccggtggtgcagacctaaagcagtctggccttgaccacggggctccggtgcctctcaggttggagtctcggtgccacatcacccctggtggtcagatgccacatccatgctccttcctgggccatcctgagtgccccactatgtgccaggtcccatgcaggcccggggatggccagggcagcccacagcctctgtgctcctgggtgaggtggataaccaaccatcagataaggcaggttgggctgaggtgtgagctgagcccctgatagggtgtgggccaccattcgggaggagaggtgtctgcagcccctgtgggtatcagggtgggcttccaggaagaggaggaagaggtctcggaatgagcttcaaaggatgcataatattcaggatgtctagtcctttgtggcagctacaaagcacacgtgttcaggccctggggccaactcggcagttgtgacccctccagctccccaccaccatccactgccatccctcccccaaccctggtgttccgcccaggcttggccgctctggcaccaaccaagcctgcagtggaaccagcaggatcccagatatccccccaacccaatgagaagggcagctctagagacccaggagccactgtctaggcaggcccctccctacactggaccctgagatgccccacgaagagcaggatttaatggatctcaaagtgagggagaaaaactcactgtctccaggagctcgaaaaggcagaggctcagagaggcacagaaccgccttcaatgctcttcagccccatcctcccacctgacgtgaccccaggaggctttctttgaataacacttactaacagcccaggcacagtggctcacacctgtaatcccagcactttgggaggccgacgcagatcacttgaggcccagaggttgagaccagcctggccaacatggtgaaaccccatctctactaaaaatacaaaaaaattacaggcaggcacctgtaatcccagctacttgggaggttgaggcaggagaatcacttgaaccctggagtcagaggttgcagcgagctgagatcaccctactgcactccagcctgggtgacagagcgagactccatctcaaaacaacaaaaaaacaaaaacaaaaaacacacttattgacccggtgtggtggctcacacctgtaatcccagcactttgggaggccaaggcaggcagatcacctgaggtcgggagttcgagaccagcctgaccaacatgaggaaaccctgtctctactaaaaatacaaaattagccgggtgtggtggtgcatgcctgtaatcccagctactcaggagggtgaggcaggagaatcgcttgaacccgggaggcagaggttgcggtgagctgagatcgtgccattgtgctcccacctgggcaacaagagcaaaaccccatctcaaaacaaacaaacaaaaaccttattaatagtgtgacctgtcacaggccaccacgagatgctcctctgagtgcgggggccgctgttatcacaccaggacatcagtgtcacccaggtggacacgtgccccacaggaggacccttgggtggtgctgtcaccctgcttaggaaggcagcagggcacagggcccagagtggggcttggaggcgcctagctgtcgaccagcccctgctccaccgctgcccacagagcctctgggcggcctcaggcaggtctcctccctggtgtgcaagcccctcctcagccttccccaccctcctccctggactccaggctggcaggagcccctggcaccctgaccagtgcttcccagtgagggaggaccctcctccctaactccacctgcagaaacctgtgggtggccatcagggtgggaggctggttccgagtgttctgggtttgtgacctggaggggtcacttatgccagcccctcgtcagcaatgtgggtggtggaggtgcgtggggatgtgctgtgagcatccccaggtgcctctgcagggctgcctcccctggcacacctgtccccaggccgggtctgcctccttgggaagtcctcaatcctcaggggttcccgatgtctgcccccacacaatctgcagctggatgtgggggcaggaagggagggcatgtccctgctggggcagggccaggggtgggtctgggatggagggggtgggtccctgaagagtcagagtgagggggagcctcctggtggccccttgggggatgcgggatatacagaggtgggggtggggcatgctcatcccgtgtgccccgcaggtcgctgctggctggacgccctggagctggccctgcgctgctctagcctactgagactgggcacctgcaagccgggccgagacggggagccagggacctcgccagacgcatcaccctcatcgctctgtgggctgccagcctcagccaccgtccacccagaccaagacctgttcccgtgagtggggcgagggcacaggggctggtggtgattcacggggtctccttgtaggcgaggaagaggggagaggacagccccagccactgctctggtgggctgcaggctgcacgcagggacttgttcgctgcagtgtgccctgggagcctcggttccttcctctaaaacggggctgatcgtgtcaaatgtgggttgtggaggtgacgacaggcaggaacgtatgtgaagtgcggagcagcgaggggtgggcagcccagagggctgtgctgggctctcacctgtgacagggacccactggcaccatccaccttccagactgaacgggtcttccctggagaacgatgcattctcagacaagtcggagagagagaaccctgaggagtcagataccgagacccaggaccatagccggaagacggagagtggcagcgaccagtcagagacccctggggccccggtgcggagagggaccacctatgtggagcaggtccaggaggagctgggggaggtgagagccccccagccaggagccccaagcgtctcccctgcctcggccccttgttccggaagcagaggtagccatgcctcatcctagggggagcacgcagggcccagggggtagcttttgtccccatcacttggcagtgagtccaggagctgtcttttaggtaaacaggctcctcccgtcttccaaagaggctgccccgctggctggctggctggctggcatgcagatgcggggatcgggcaggggtttgctgcagacaggcaactccctccttgggctggaatgcgctgatgggagaacaggaggctcaagaggggcccttgaccccatctgctgggcggccccacttcctggaggagcgcagaggagggcgtgtggacctgagtcccatgctcacaggcacctgcacacctggtgctctcctggggccctgggagagccatgaatgagacagacctgggctctgggcccccagtgtatgggcagcaggaaacatagatgataaacccacaaacacaagaggaggctggggagcaggtgagggaggcaaaccgggccatgggctctttctgaagacgtgagtgacgggagggaggatggcgttccaagaagaaggaccaccagcgcacgagctcaagggaggcagcaggcggtgggcagcagtgtccccagagcatgcctgcagatgaacagccagggcagctgactccccgcagctggagagaactcacgtggccctgggcaccgtggggcgcctcaggaaggggagtccggaaggaatcacaggatctaagcttccgctgggtgacgggtgcaggctgaggaagccgggctctggggtgggggctgcgctctggggtgggggctgtcaggaacggggggctctgtgatctgggatcttgtcattctcacccgggaggcgagacaagagcaaggccgtggctgtcactgagggcaaggggcagtcccggtttcagcaggaaaggggaattcgttccttgctgttgtttggacagcgtcgtgttcgcatcttgctctgcacagggacagagggggctcctccgtggtccgtgaaatccttgtgttcagtggaacaccatggcctccctgcgggctgctgttcccacagagctcaggctcctgtgcggggatgggaaggttaggatgggcctatggggagtggaccgagggccctgggggcctcaggctgagagtattggggaagccaccggcgggttaggcaagggcctcgggacagccgaggggcgggggtggacactgggccacccgtagggaagacccattgttaggagaaagctgaggacaccctggacccagctgtgatggagaagggagaagtgggcagactcagggtatttcggaagttggattgggtagatctcagccagatggtgatgagcgacgctgctgtgagccaggcagagcgggctgctgcaggtgcgagcctggggctccgggcagagggcatggagcgggcagccaaggggcccgggcacccaaccttcagaggccgagcacagataaggcttcacagaggtggggcagggaggtgggaggatccaggagcccaggtgtctcagagccagctggtccgagaggtggggcaggatgagaagcagggatggctgctggaccagtgaggagtggtggggacctacggcaagacagtctcagtagagaagacggcagaagcctggtggagagggttaaggaggacgggacgggagcacatggacagagcaggattcctgacagccgaagctacccatgatttccaagccccaaagctacagcactgggctccccatgacccctcatggggtcagacatggctcctgggtgtccacacacactgtccactgggccagtgccaccaggatctgtccgtggccatgcgtgcacagagaggcgaagccatttgcctgaggagtcccagcagcggggatgagatcctgatgcaggactcacaggccacactccatcttgcccgctccctggggcagctgccgttgggctaaaaatgcagagagccctgagttcagatctgacctctgccgcatagcagccgtgtgaccttggacaagtcacttgtcccctctgtggagggggaggaccagggtccccgttccctggggctgcggtgaggtgcaagtctggagtgagtaaggggagccccgccaccccaagtcatgtattctggagctgtggtgagggttagatgtctcagaaaaggaagagatgagggggccttcgtgaggggcacacaggcttcggaagtgaggggtgagttcacatgcccgtgtcggttttgcaggagcaggctcacctccaaactcacccagttgtccacattcaatatctgaaggcttctgtatatcaatcagacctcaataaagtggttcaaaaacagaaaaagaaatgttacaataaccttttttaaaaaatggaagagcaggccaaatccctgcctcccctggcagctgtgaagacagggtgggctgcagtctctctgttccctgggcccagggtcccacgatgcacagacaggtttcaacagcaggtgttgggaggctgcaccctggactttgaggagggcagggcatggggtccctgggcaaggagcagagacaggagcgggcctggacctgggctgcgggtgctccaggggtggggtggagacgcattgggaagagttcacatctgatggggctgagtcagcctcatgaggccatggaggccaggtcaggggtttacaccctaaggggtggcaggtacagcctcctccagccagagctgccactgtcccgccaccccttcctcccggctcttccgggcagggcctgactgcagcctgtctgctgcagctgggcgaggcgtcccaggtggagacagtgtcagaggagaacaagagtctgatgtggaccctgctgaagcagctacggccaggcatggacctgtcccgcgtggtgctacccacgttcgtactggagccgcgctccttcctgaacaagctctccgactactactaccacgcagacctgctctccaggtgcgcgccatgccgggaggggcaccccacacctcgtcctgcatctgcatgagaccctgcagcacccccagcccctacctgccctgtgggggcttccagagaatcccatggctgatctcagcccactgtttctgcagctgtagcctcccagggggccctgtctccaagatgggcctgggaggagccagccatccgtggtgagaggggggtcagtcccaagcacttgccatgcaccctgagccctgcaccctcgagctggatgggatgggctgcagaggcaggaagggggctgcagaggcaggaatggggctacagaggcaggaagggggctgcgcagactggaaaggggctgcagaggctggaagggggctgcgcaggcaggaagagggctgcagaggcaggaagggactgcagaggctggaagggggctgcagagctggaagagggttgcagaggcaggaaggggcagcagagcctggaagggggtacgcaggctggaagggggctgcagagactggaagggggcaacagaggcaggaagggggctgcaggctcaggagccaggcagagggagcaggtgggaacaagagcatgggcagggaggcttcctggagacaggggcaccctggcagcccaggtcagcagtgtcctctctgccccagcgtgggagcagccctggcactttctgattagaagaacccacttccccagagaaaattatcctgcttgggggtgaccagagcgcctgggccaagtggcctgtttccagctgagtggttggaggtcgggatggtaggagggaagggtcagggaaagggagggtggcccacggcccccggagctggggtcagcgttctcctgccccatggcagggctgcggtggaggaggatgcctacagccgcatgaagctggtgctgcggtggtacctgtctggcttctacaagaagcccaaggtgagcccctgccagccagggagggtggggctccggcccaggagtctgtctgctcagccctcgtcccttggcacttccctgagtccccgggccaccccctaccccacatggcttagaaggatcctggtcacccccacagagggcccaggtccttggtgatgggggacagggccccacttcccacagttggggccctggatggctcaggccgggtccccaagggtggtctcatccctcaaggccccaagctggaccccttccccaccccccaagaaaacagcctcaggccgtattacagatggtgccaaaagaaaggagctttaaaccttaaacctcaaggtacctttgggatctgtggttttcataaatttttagccatggaaaccccttttagaaccccaaacccaggactccagtgacagcagggctgctctcgttgtagtgagcaagagggcccgcagctcccctgaccccaccacagagccctggggttccatgggaagcaagtttgaaaaccacgaccgtggttccacttctttattgtgcagatggggaaactgaggctcaggtgaaaggatggcctgagtcgtacagcaggtttggggtagaggcaggacttctgactgcctggtgccttccatggctttcagcaggctgtgtgcaggttacacccaaggtccaaggagagtgtgacaaggtcagggtctcgtgtcccttctccgagctaagaagtggacaggattcccctgaggctgtcccccaagaatgtaaaccacaggcaaagcatagtccccgcaaagcagaagtgaggtgttgttcccagatgctagcagcaaaccaggccagcaggcagcgggtagcccacccacgctgcccctccgtccacatccctcacctgctctgcacagcggacctcttacccacctggctcctcacacaagtctctgttgtctgcagggaatcaagaagccgtacaaccccatcctgggggagaccttccgctgctgctggttccacccgcagactgacagccgcacattctacatagcagagcaggcaagagcacctctgctgcaaccggcctgggtgctgggctctatggggcggggctctgtgggggcggggccctggcagcaggcaggggcaagcgtgaccccgagggccggcttccaggggaccccacatcctgcacaccggaagggctgtggacccagccgctgccaacagggattcttgcagaaggtgcagacaccaccatgactgtgacagcagacagtgtctccctagggagaggacagtgtgtcccatctcccgatggggacttctggggcaactcagggcccgcaagccccacagctgaggcctacctgccctgggcgtcgtaagcgagagccaggaaggcccctacccgaatcctgggatcgggggagaagatgtggcgtcagggacagggacaggttttttgggggaagctgggctctcgcttcctgggattacctgtttccggggctgtttacagagccgcctccctgcacgcaggtgtcccaccacccgcccgtgtctgccttccacgtcagcaaccggaaggacggcttctgcatcagtggcagcatcacagccaagtccaggttttatggtgagggggtcaccctgggcgctccctggggcctcagggaaatgcgatggtcgggaggactccgggagccagtggaccaagatctggatgggggccatgtgcctgtccctcccaacccctcctagtcagagaccatgtggtggtcaggtgctgagacccggccatgaggcagagctgcccgcagctccccgagctgagagtgggcaccttttgtagggacgctgtggggactgagagagggcacctacatggaaaggtgcggactggggctgagcagccccagagcactgcatgactatttgaattggctaaaatgaaatgaaacttagtcaaagcatggtggctcacgcctgtaatcccagcactttgggaggccgaggtgggtggatcacttgagatcaggagtttgagaccagactgtccaacatggtgaaaccctgtctctactaaaaatacaaaagttagccgggcatggtggcacgtgcctgtcatcccagctactgggaaggctgaggcaggagaatcgcttgaacccgggaggtggaggttgcagtgagccaagatggtgccactgtactccagcctggacgacagggtgagactctgtctcaaaaaaaaaaaaaaaaaaaaagaaatgaaactgaaactgcagtccctctattgccaaatcacacaggctcagtgttggccccggagtgggacaggcaggagggaagctctggtcttcagagacagccccattggactgcactgctctggggcctggcagacttgggtgctcagaaaagtgtccgtttacatttcgtcccatccgttgtacctttttcatcagtttcatccatgggcaggtgtgcgcctgttgcctctgtgtgctcggctctctgctgggtgtgtggaactctgggagggggtcccaggtgcgaccctcaggttcagcccacctttcccaactctgtcctctcctcaccagcagtacctgcgactcgtggccccaagcgaggcgtactccctccacagggatgtttaaaatctgagcagggctcagtcgagtttgaaaaagtttgcagcctccaccctgcgaatctgcagttttgcgactgcaataaaccactaacaagtcaaaggtgaaataacttctcagcacagatgtcctgtgcacactggacaaggattttacagaatctgaggcccagagaggttaagtgactcacgcacagacacaccactggaagtgccaggagcgtgttcagctgttggaaggagctcagaccctgtgacttaggggtggcctcagatgtgaaagggctgtccgcactcactggtcctgctgtctcttgtctctgcagggaactcgctgtcggcgctgctggacggcaaagccacgctcaccttcctgaaccgagccgaggattacacccttaccatgccctacgcccactgcaaaggtgagaggctcagccacacactccgagggcagagccaggctctgtgagagcagctagatgctaaaaccctttggttatttgcttgaaggtatctttacttcgccttcatctgcccatgactttttttttttttttttttgagatggagtttcgctcttgttgcccaggctggagtgcaatggcgtgatcttggctccaagtagctgggattacaggcatgcgccaccacgcctggctaattttgtatttttagtagagacagggtttcaccatgttggtcaggctgatctcgaactcccgacctcaggtgatccgcccgcctcggcctcccaaagtgctgggattacaggcatgagccaccgcgcccagcctcgcccatgacttttgaaggtgggtaattccatgtagatgctattttactgccctttgaatatgtgcgttttgcttgccttgtggcttccattgctgttggggatgatcagctgtcagcctatttgttacctaatctgcttttccctgtagctgctttgaagatattttccttgccttggtgccctgtagtcttgctacagtgtttcaaagtttggatttcttttttattttttcattaacagactttcttttttacagtagtgttgtgtttacagaaaaattgagcaggaagtacagagagttcctgtgtgtcccctacacagtttcccctgttattaacatctcacactgaggtgctacatttggtatcatcgatgagccaatactcatacattgttactaactgagtacacagttcaccttccttttcactccttgtgttgctcattctgtgggttttgctaaatacagaaggacatgtatctgccattaccacatctcacagaatagttgcactaccctaaaaatcccttatgattagacgtgactagatggagccacatattcctcagtccctccaggccctggctttttccggaatgtcatgtagttggaatcatacggtgtggagcgttttcagattggcgtctttcacttggcaatatgcacttaaagattcctccactaggcatgatggctcatgcctataaatccctgcactttgggaggtagagttgggggaatcacttgagcccaagagttcaagaccagcctgggcaacatggcaaaaccctgtctctacaaaaagtaccaaaaaactagccaggcatggtggtgcacctgtggtcccagccttgggaggttgaagtgggagaataacttgagcccagggggcagaggctttgaggagccatcgtggcaccagtgcatgccagcctgggctggcgtgagatcccatctcaaaaaaaaaaaaaaaatctttgctgggctcagtggctcacaactgtaatcccagcactttgggaggttgaggcaaatggatcacctgaggtcaggagtttaagaccagcctgacgaacatggagaatctccgtctctaataaatatacaaaattagccagacatggtgatgcatgcctgtaatcccagctactcaggaggctgaggcaggagaatcacttgaacccgggagttgaaggatgcagtgagctgagatcatgtcattgcactccagcctgggcaacaagagcgaaactccatctccaaaaaaaaaaaaaaaaaaaaaaaaaattccttcatgtctttttatggcttgatagctctggatttctttttaatttttgctgattgaaggtttttgtttgtttgaattatttgaacctgaggtttcgtggctttgatgaagtccagaaaattttagccattttttttaagtgcctcactcctgatttctccatttttcctagaactccaatgagacagaatttgaaccatctcctcctttgctttgtctctcttaatgtttccatcgtatctcttatctctttgcattctagataacttatgtagatgtatctttaactctaattaacttgacgtgtaactcatccactgagttttccattttgatatattgtttcccaagaagttctacttggtttcatttcaaacctgcctggtttttttgtttgtttgtttttatttttgttttgagacgaagttggggtttcactcttgttgcccgggctggagtgcaatggcatgatctcagctcactgcaacctccaccacctgggttcaagcaattctcctgcctcagcctcctgagtagctgggactacaggcgcccgccaccacgcccagcaaattttttgtatttttagtagagatggggtttcaccgtgttggccaggctggtctcaaactcctgacctcgggtgatccgcctgcctcggcctcccaaagtgctgggattacaggtgtgagccagtgcgctcggccttgcctgttctttttatactcgtgcattgttccttggtcatgtttccaatcctttctcataaatctttgagcattgtaataagcacagttgttttatcatctctagctggtcactctcatattctgttttgtttgctgctgtgtcctcactgaccatagtgttgcccttgaaggtgctcgataattattcaaagaatggctgtatttagtaaaaccttgggattctaatttgctagttttgtgtttgtttgttttcgttttgttggctgaaattgttttgttggctctcacattttcttagtaggttgtttctgggacacagaggaagtatagatttgaatcccaaacttaccctacacattcatggagagttctggggtttctttttaaccccggagcgcaggcccaatacaaatgtttccttgactctccctctggaatgaacggcctttctgcgactgttccttctgttgagggtgtagccatgtgagagtgcctgcttagtggaaatgtctcggaaaaaatctctcctggttactctgacccaaggacctgtctaccactttccacggcaacctcagaaaccaagatctcagatcgacaaatgcccctctttctcttccccccttttcctctcctcctcctcccatcttccccttctttcctctcctcctcctcccatcttccccctctttcctcttctcctccttccatcttccccctttcctctccttctcctgtcttccctctttcctctcctccccctcccgtcttccccctctttcctcttctcctcctcccaccttccccctctttcctcttctcctcctcccatctcctccctctttcctctcctcctcccgtcttctcccctttattttttcttgtgggagaattcccatcttttcttgcatgctcattgactcatccatgcttcatatattttttcaactttttattatggcaaagttcaaacatatatcaaagtacagtacaccccatatacccacagcacagcaatgcacccaccttcatgctctcccctgaattaattggaagtaaatcccaaatatcatgtcatgtcatttgtgtattttattttattttatatcactaaagttaaggatttcccttctttctttctttctttctgtctttttttttttttgacagagtcttgctgtgttgcccaggctagagtgcaatggtgcaatctcagctcactgcaacctccgcctcctgagttcaaacgattctcctgcctcagcctcccgagtagctagcattacatgcgtgcgccaccacacctagctaatttttgtatttttagtagagatagggtttcaccatgttggccaggctggtcacaaactcctgccctcaggtgatcagcctacctcggcctcccaaagtgctgggattacaggcgtgagcccccacgccaggccgggatttcccttcttaaccatagccacaatactatcatcagatgaaaaacaaacaaacaaactcttagttgtcatcgagtctacaatctggttcatatccccagctgccacgtgcctgtgtcttgatcccccacacacgtgacagttggccgtttggctgggtctctgcatcaggccatgctccgtgcatggatgtcctatgtttacatctccttgatgtccctccctcctgtttttcccttgcagagtattactcatttcctcctagtcccctctagcatggattttcctggctgcattcctctgccctggggatttcctataaaccacgaattgatttgatctcgagatgcctgatcacgttcagcacagtttttttcaacacgacgcttaatgggggttttgtgtctttccacagcagggtgcacagggcctgttgttccttgtgacattagtggacattgattctcaatgcctggatccattcatgtaaaaggcattgctagatggtgacgttccatcctctttcacttaatcaccggaaggcttctcaaaagagaaacttccccttgtctactatgtggttacccaacaggattggtttgttttaggataaatcccaggttttttatattttcaaaataatgatttttttcccctgctgtcttccaaaggtgactggcgaaggtcattattgccacgtattatttgataggaacgtatttggtgatttcagaacctttcagttattaactttattgatattgaaattgccccatctttggccaatgggggccatagttggctcaggggccccctgcacaccccagtacctctgctggtattcttccttctgccctgaccatgtgtgcacctaggacatttcctacactagacctcaaatcgaccatttctcccgggagctccaggttcccttcactaggaaataatatttagtgatcacaatctggaggtcagacctgctttgcttttctttcttttcttttcttttttttttttttttttgagacagagtctcactctgttgcccaggctagagtgcagtggtgtgatcttggctcactacaacctccgcctcctgggccttcttcctctccgtggagcctggagacctccccccatcagagctgcacagagatgccgctttgtctttctaggctgcatagctttccatcgtgctcatgggccagggtgcactcacacagccccctctggagggatttgggggtgtttcaagcctttgttgcaacaagtagcttgttgtttcttttcttcatttttaagagacatattctgccacacatttctaagtggtttttagagtgcaaatgtttgggttttgatggtggaggtggtggtgcttctttaattagattacctcctccatatgccagacatggaaaagttgttctttccttcattaattgaaaaaaaacaaaacaaagaaagacgtattaatttttttaaacatacgggatgccatcatgggtgctggtgccctctgtgttctgggtgccatcctgggacgcagcagtgagcgagaagatgcctgccctcaggagcccaatgccagagcgggaactgcagagtcaagtgaagcacgatgcatgtctcacagggctggtggcctcccaggaggctggaacaggaggcgacacctgacatgagcaaaggccctggcgaggacagagcccccttagtgggggagacggcccctgagggaccaggcgtgcctcccaggctccgtgcctcccaggctccgcacctcccaggctccgcacccccaccagcctctccctgtggggttctgctcccagcgcctcctgtccttctcaccctcccagggactgacacaggcctcccagggatcggtgctgctgggtcgggactcagggatcggtgctgctgggtcggtactcagcagggcctggggctcagcagggctggggccgcctggcccctgacactggctgcatttcaggaatcctgtatggcacgatgaccctggagctgggtgggaaggtcaccatcgagtgtgcgaagaacaacttccaggcccagctggaattcaaactcaaggtagcgctggctgcagcctgggggagacgaggccagggaaggaacgaagccttggggatccccctcacactctccccaggccccaaggaaggttccccaaggcagtgcacataaggggagcagctgttgacatcccggaacacagacagggcccagagaagggaggctgctgcctgcagccacacagcagagccagcctaggccctgtctctgtggcagggacactacatccttgagcggaggcgtgggggtcccgaaggcctcgttggcgagggttgggtccatccctcctgggctcccaggcaccccaagagaataactgttccgtgcccccatgaggatgtgattctggaggccccagcccccgctcactgggctctgttctgggtgtggccccgcagcccttcttcgggggtagcaccagcatcaaccagatctcgggaaagatcacgtcgggagaggaagtcctggcgagcctcagtggccactgggtaaggggccgtccctcagggcaggcacggccgggcggtcaacgccaggccagcctctgaccccgctggccatctggggcaggacagggacgtgtttatcaaggaggaagggagcggaagcagtgcgcttttctggaccccgagcggggaggtccgcagacagaggctgaggcagcacacggtgccgctggaggagcagacggagctggagtccgagaggtgaggcctgtcagcgcccagggaccctgctgaccacagcctgacatggccaagcaggcaggtcagcagggctacagtgctgtgagcatggccccaggatgtccctggcagggagggcaggcctggtgcacccctggtggcagatcacgtgtcctggaaaggacagatggagggaaggggtgtggcctggagaggagccggctgccgtgacctctcactgcatcactgccggcgagtgaccaacaggtgcacagggaggtccctgcaggcgggagatgggagctcagtgttggaaaaacccatctcatggacaaaagaaaagctctcttcaaagtagtgagctccctgtcactgtaggcaatcacgcagaggttgctctgtgccttccttctggtgccaaggggccctgattcctagctgcctaggggtcgggctgcccgggccactggctcaggatgggtcactggcccgcaggctctggcagcacgtcaccagggccatcagcaagggcgaccagcacagggccacacaggagaagtttgcactggaggaggcacagcggcagcgggcccgtgagcggcaggagagcctcatgccctggaagccgcagctgttccacctggaccccatcacccaggagtggcactaccgatacgaggagtgagtgccgacaaagccctgggggccacagggtggggctgggcctagcagacgggctgagaagggcccaggggctcctggcttccctctcaccttcagcctgtcccctggaggagtcggtgggggagggtcagatagtgacaccccccatcatcagtccttactgcaggccctgcccatggggtgtgggcagtggtcattctcctggaggtctctggccactgttggggggctgaagactgggccaggacagccccctcacctgagggccactgcctgtgctgatgaacgccctctggaccctccagccacagcccctgggaccccctgaaggacatcgcccagtttgagcaagacgggatcctgcggaccttgcagcaggaggccgtggcccgccagaccaccttcctgggcagcccagggcccaggcacgaggtcagcaccccacaggccccacccagggctggtcttagctgcacgtgtggccaccaccacccctcgctcctcacctcactcctcccttcccctcgctccgtttccctcacgccctcatcccccagccccctcgtcccctttccttctctgccgagcatgggactcaggaaaccgggatttgcaggatgctcagttctaggggcaccttggcttgtgggaccctgtgtctactgtctctgtccactgcccccaaagtctccctctgccaagttagcagccacattatcccattccactgatcaggaaacagaaggtcagggcagcccagggcccttcccaggtaggaggaggaggagccagcacttgcacagatcttgtgtctggaaaggggaagcgggacagcaggaggctccagggagtaacctgaggaagctgccttgggtgtgtcttggtgccatgccttaggcggccaccaggtggcgccaaacccacacgcccccgttccaggtgtgctgagctgcaccgccccagccgtgcacctactgcgtgcagagggtgcagagcgcggccggtgctcacccgcagcggacaggatgggggcgtgttccccagctgatgccgtctgggccagactcagatgagaggccttgcttgcctgatggccctaacttctccagcaagctgggggccgcggtatctccttggctgcatgtcccatgctctgcctgccaagggactagggaagaagcctcaggaaggtagacagatgcaccccctatgtctgcagcacagtctccatccccccgggctcaggccagactgctagctcctgccttcccttggccccagaccctcgcagtcccgctcctcagcctctccccaccaatctccagcagatgtccacccccaatgccctctgcagcctcccaccccgcagcccctgctgaggtcagtcagcctgggccctgccatgcctcaaaaaccatcccatggagtaccttgtggccaaacccacctgccccgcctctgaccccacctgtcctggctctgaccccacctgccccgtcgctgaccacacccaatgcagagcgtccctggcacctctctggccccaaacgcctgttgttacatggtggtcccacagccaggttctgctttttccccacccctgagcatcagttcctgtcctgggttccttgtgagctcaagtaagggctgaatggatgagccctgcctgcactcctggggttgtgagcagccggctgagtgtgggggttcccccctggagatgccccttgacatggggaaccctagccatctggggttcctatgaacctcccagctcccacagtggcctcggctttcatctgtcctcatggctcaggggtcagaaccaccctcggccccccatgccatcatctctgcatttattggatgcaacgccatggtgagcacagggcaggcgtgtctgcaccaccttgcaggcccttgctcactgtgaggggtcagtagctctgtctcacccatgaggaaacaggctcaaagggaccatggctactccaggccatgccggggctgagacagacccctccagccagctccacagcccagcagctgccctccctgctggctgccacctctagcactgtcctggcataagcatgccaccatgtccctggggcctgggcagggggcgtgggtggctttcagctgcagcagctccatttctctgcagaggtctggcccagaccagcggcttcgcaaggccagcgaccagccctccggccacagccaggccacggagagcagcggatccacgcctgagtcctgcccagagctctcagacgaggagcaggatggtgactttgtccctggtgagcccccttgggcccagccccaaggcctctgtctggtggggtgcctcagatgctgacctggctggaggggaggccagagaagcacctgcccagatgtagggcaacctcccagcaaaagctcctctgctgccctgaggggccccccagcaggctctgccctctcagagtctgggaggcagcccaagggccaacggggggaatggtgggggtggggaagaaagggagtgggcccaggccaggggctccccagcggtgggaggggcaggtccagtggcatcctgccccagccctctgctcctttcctgtcaccaggagctgtgtctccccaactttgtccctgcctctgtaatggatgggccttgccttggccacttctgcctcccaggcctgttagtggctggtccagcctgggggttccctccagaaacatcctcagcacccctccctcatctccgtgtcttcagcttggccctgcaggtttcccatgaggtggggtggaggcccgagctggatatgaccctgtgacccacgtgccagccccactggacctccagctcatcctcactcctcccctcccctcctttgtctcactcggggccgtcccaggcggtgagagcccatgccctcggtgcaggaaggaggcgcggcggctgcaggccctgcacgaggccatcctctccatccgagaggcccagcaggagctgcacaggtgggccacactcagggtgtccatccagactccgggtcagagagtgcgagagacctggtagagctagggcgggaggtggggaggccaggaggccgcggctggggttgtcatcggagctggaacccacaagacctgcagggtgatgaaaggaagacaaccgccgagggcaggagagagggtgtgggagcggcaggtggtgcgggatgatcaaccagccaagttggccatgcctggcagatactgagctggagatgtcctgaagcctagaggaaggtgccagcccagcatggcctggggtagccccaggagagaccttgaggtgtgcagagcgaggtggcagcctgggctcactgtggtggccccatacctgcgcacagtggcttctcaggaatggctggggaaggagcaaatgggagtggccgagagctggcaggtgcaggccaccagggccacatggccccttcctgtcagcagatcccaccaatgaggagcagagcacagggtccctctcgggtccaaagctcctgactctgagccaggctgagggtctcactggctgtgggaccttggctgtcacacctcagcctcccctctgtaaagtgggcttgatagcagtaccccagggtgaaatgcagccagggcacaggcccgggctctgtgaggctcaagagccttggggaactgtcattgtccctgtgtaagcatttccagaaggtgctccctggtgaggctgtgtgggcagagaagcagggaggcctggctccccagaagcaggtcagctgtcaggcaggtggccaggactcagccagaagcttctgcagcaaactggataccgcctcagaggccaggtcctccacggcaaagtactccagctcagggccagggcctccacagcagagtactgccggcaaggggctcggacagcgcgtctactccctcgcggtcccggaggctggagtccaagatctcggtgccacagggctggtttatcccgagacctctctcctgcctggcagacgccagcttctcgctgtgtctgtgtcttcatctcttcttcatataaggacaccagtcccatgggaccagggcccaccctaatggtctccatttaaataaatacctctttaaggaccccatctccaaatacagtcttatctaaggtgcaaggggttaggactccaacatatgaaggtggcagaggcatgactcagccataaccacaggggtgggagggaggatgtaaaaggctgactccccaatccctgaccctcctctgccctgaatgtgcccagggaatcccagtatagccatggtgctgtggggccctcccactaacaagctttccacccccacccgctctgttgcccctggagggccatcccatctccacctcggccctgtgtccagcacctggtcaagtacccagggcactgtcctggcttgtgggagggggacttgctggcattggcacagcccccacgatctgtcgcctgtccttgcaggcacctctcggccatgctgagctccacggcacgggcagcacaggcaccgaccccaggcctcctgcagagcccccgatcctggttcctgctctgcgtgttcctggcgtgtcagctgttcattaaccacatcctcaaataggagccctgagggcagagctcctggccggtcctgagccctccctcccaggcacccagcactttaagcctgctccatggaggcagagaggcccggcaagcacagccactgtgacggggagtccaggcgcaggagggacccggggccacaaggcgctgcgggcccaggtgtgctgggcccctctcaggggcactggcctctctgcagggccttccgcccagcgctggccttaatgctaaagccaaatgcagcttctgctgtgcgacgcactcctggccatcttgccgtgtcaccccctgtccggcctccacttgccatgggggatggatggatttagggtgggagggcctgtgggggccctggacagtcacaccccagcagcagtgagtgggcaggtttggaggagccccgagtggcccaggagtccccccacacacagatgcataggcctgccttccggagaccctgtccacattgccgggaccaccctggtggggccactggtgggtgccagggacaggttagggccactctggggaaggcattttggttttttattccacgctgtgctgtttggatgggagccccacagaggcaggtcctggaaccaccccacccccacacctggacgctcgctctggtgggggcacacgcaggtggaggtggttgtgggtgcaggtgtgtgcaggggtgtggggggcgcaggggtgtggcttagctggccccgcacccaggccggggaggctcaagttcgccactttactcagaccgatgcacagtcttcccattttacacttttttaataaacataattgcaatattttaggtgggctgcgagctgcagtcagccttcacgtctggcctcagtccccgtgtcagtgccgctctgcgtgtgcgtgtgcgcgtgtgtgagcctctacacatatatatacgtacagagccttaaaccacatcgtggcggtgccgtctgagctgtagcgggtggctttgtttccagtttttgtacccgtgtccttgtctcccctcctcccccatctggggatgtgtctgtgttccacaccttgaaataaacagacacatacgtgttctctt

SEQ ID NO: 28 - DNA, 50476 bp, Homo sapiens
ctggctctccgctgcgctgcgctgcgctccggccgctcccgcggcccgtggatgggggtgtccggctgagccccgggatccgcctccctccgccaggacccgcacaggtgccgtcgcgggggttgactttagttaggacccgactcactgctgggggtggggtctggtgggggtggtaaggaggccccgggattctctgacaggacggtctggggtcgccgcagctcccctcacctggtcccattctgggattagaaaggaacaacgggaggccgtcgccttcctgcccagcccttcagggagcgcagctgggacgccgcgccaggccctggagatgtgggatgatgggcacttccagtatcatctcagcatcggccctccagccaggcctggtgtgtgtgtgtgtgtgtgtgtgtgtgtgtgtgtgtccgcgtgtgtgtgcccgcgtgtgtgcgcgcgtgtgaaggcagggcggcgaggtatgggggctgggggaagaagggaacgccgcccgatcgcgctggggcagtgggtcggtacctcgtcccgggaccgttatctggtccagtcaccgtaaacgccccaagatcatctttgtccctaaaaacttacccccgaccccgctcgtgcccctccccagagtgcggagccttccccagaccgcgcattcctgcagtgtcagaaccgctggcagcggccgcagacgccgggagagcgattgttttactacagacgggcgggagaagggaccggggcggctgcgcggtggcggggcgcgctgccgtcgggtgggccccgggctctggaatgcggggagcagtgtttgacggcgtcgaggaggtatcacagcccgctcttcttcccttttgcctatcccttctctcctcgccgctaggcatccccgactctcatccctctcccgtgtccgggcttgtttggccggaagggcagtggagtgtgtatgcggcctgcacgggatgagtccggcttcctcagagtgccagccattgtgctgcctggaggaggctttctttaccccaccggactggggggaggagggggatctgagatggaggtgaatggagcagcgggaggagggggaggggagcaagcagaaccgcgaaggggttgctgatccatatgcaacgaaatactttttctgtcaaaatgtgcacaaacatgcacactgggtgggttctgcggaggagcagtgggaaatctgaaggtggatcagtgcagggtaggttttagggacggatatgggggacgaggcacggaatcagttgatctatggaccaagtgatgggaagaaggagatggaatggggcttgtgtggaggtgccgaggcccagcggggttagcgtggtgaaatctccaccgctccgctccactcgggtcagctcagcaaagcagggactgagcatttgtaccgcagccccgagatgcagcgagtgcatcattgtgctgcagggagacgtttatgcgtttcctactgggtctctgttaagccccgtgagtgtcttttcttttccaaattacaccatctattgggagtgaaaataaatggaatagattgtaggacaatcagactatagtcctgcgctctgttctgtggtaaagagaaaaagaaaaggcgaccctcccatggttccttctttctgccattttcatgtatgtacgtatttatttttgatcttggaagtctaaagggaataagctatcgcttgtattaatcctactttaaggaaaagaaggctcccagatgagctatgaatgaggatggtgcaagcttgccaggatggaaaataaggttgtttcagacattttagttgaaggatgaaagcactccgtgaagagaggagggcgaaagaaagtgggctaaaggaaggaaggcagggtcaccatctaaggaagtgctgccaaccccaatccacagagccctcctggaggctatagtggggccagtcagaacgcctgactctcatctgtgccacagcctgaggtctttccacaaatgctggattcagtttgggtgttgagtgactagtttcccagcactggctttcactttaacttcatctccagatggtcattcatgcagcacttcttggctcttggataatgagttgacaaaaaacaatcagtctatattatggactgtttcaaatgagcatgtgtctgaaccctagagctgtgatattcatttcgtcttttataattttctagatgaatccattttctctacactctgcctgggcagagtgctttcagcacactcttcctgttgccaacactcaaaactcagtcttagtcctagattctggttggattggcctcttgttgctggttaatcatatagactgtgtcatttcaaatcagaaaccccactggtgtcaccatctgcttctcccctgtcattcccagagaaaagtacaaatttaaaggcagtgtaaatacctgcaacactatcggattggctttcatatctctgtaaaatggaacccacgatccaggaacctttgaacaaataaattgaaaaaagaagccttagtaaaaaagatgctaaaattctttcagcaatagttctcttgtttgataagcatattgaagcattgcacagagaatatcatggcagggataatttttcttttacttgaagcactcccacatcacctttctttctttctttctttctttctttctttctttctttctttctctctttctttctttctttccttctttccttctttccttctttccttctttccttctttccttctttccttctttccttctttccttctttctttctttctttctttctttctttctttctttctttctttctttctttctttcttttctctctttctttctttctttctttcttgagatggagtttcgctcttgttgcccaggctggagtgcaatggcatgatctcggctcactgcaacctctgcctcttgggctcaagcgattctcctgcctcagcctcccaagtagctgggattacaggcacctgccaccatgctcagctaattttttttttttgtatttttagtagagacagggttttgccatgttggccaggctggtcttgaactcctgacctcaggtgatccacgcacctcagcctcccaaagtgctgggattacaggcatgagccactgtgcccagcccccacatcacatttctatgtaagttagctatcctggttttcctagaattatttttaacttttttttttttttttttaaagatagggtctcactttgtcacccaggctggcatacagtagtgtgatcatagctcactatagcctcaaactcatgggctcaaccaatcctcctgcctcagcctctccagttgctgggattacaggtgtgagccaccgtgcccagctttgatttttctagaatgattgatatttattggatgctttctatattctgcacattgtacttaacacttcaaagatgatctcatttagtccaaaaagtaatcttcaagggaagcactgttttaaactccattttatagatgatgaaattgaggcacagtgaggttgataacttgcccaaagtctcccaactaggagtgacaggaccaggacaggaacccaaagcctatgctcttagccatcacagagtactgccttaatcaacacaaatccctgggctgtgaaaactgttttactctctactgcattctgccatcttttctaatctcacttttttgttgctcagggattcttaatcttttttgcactatgacctcctttggtggtatggagaagcctgtgggctccttctccaaataatgtttttaaatgcataaaataaaatacttagtcttgtaaaggaaaccaatttcattgaaatatagttaccttcaaagagcctgcaggggtctatgtactgaagatgaagaacccctgactggcaattacttgtgtttgctttagagctgtgttgtcccttgcggtagccacaggccacatttgactgttgagcacttgcaatgtggctagtccaaagtgagatgtactgtaaatggaaaatatacactggatttcaaagggcttagtataaaaaaagaataaaaactgcctcattagtttttttgtggattacattttgaaatggtaacactttggatatattggattaaataaacatattacttcaatcaaaatgattaattaaattattgatttattaaaaataactcctaaagatgttaactctgtaccaacaccttccttataacaaatgaggaaatcaggaccaatgatgcttgtcactcagccagccattggcagatctgttggctctcgagcctgtcttctttccaagatatggtactacttgtatatatttttgtattcaaaggtcctatcatgttgcctttgcaaactgtaaatgctccaaatatgttttaaagcaacggtaatcaacttaatcccagcaaaatcccggtacaaactggcagtgttcttgcctggcatgtcctttgccttgcttatttagagttttagttttgtaggtagagatggagaatgggcactcctagggcaaaatccatgaattttgctgtctggttcccctcaggaagcgcctccaatttgagcacctaactatatcaataaccctatagaccgaagagaaaagcttggtagcctttctgttgagcgtgtagagaagggtatgatagtcagcaatgcttgtgctgcctgaaactgaaaatggaaaactgtatgtgggagatagatcattttttcaacgagcacatattgattgactgcctagccacagggtaggcagtgtatatttggagccagggaagatatccagaggatttctgtgtcctcgaggaatttaagttaaaattgaatggggcccagatgtacacacagatggataaatcacagttggaagcagtgcatgaagatggcccgatgaggggtagaggtcccacagttggtgggaactgaagggagttctgtgtgtgcagcgttccagggtgcagtgcccaagatggttatggagtatggctttggagcacatgggtagttgggtctgtttcttacaggatacaggataatagatcatttagtctattcctctgctcctaggcatatgctctatgtgtgggaaaaccttgggtgcttgtctgggcacggtggctcatgcctgtaatcccagaactttgggaggctgaggcaggtagatcacctgaggtcaggagttcgagaccagcctggccaacatggtgaaaccccatctctactaataatacaaaaattagctgggtgtggtggcacacgcagctacttgggaggccaaggcatgaggattggtggaacccagaggtgtaggttgcagtgagctgagatcacaccactgcactccagcctgggccacagagtgaagctatgtctcaaaagcgaaacgaaacaaaaacaactcaggcatttattggaaggtctctattgatgttttattagtttttttaaaaaaataaaaatagagatgggaccttactatgttgcccaggctggtcttgaactcctgagtgagctcaaatgatcctcccacctcaacctcccaaagtgctgggattacaagcatgagccaccacatccagccaatgttttattagtttctactatttattgataagggtagtaatatctaggtatacaaacccttatccaaaacccctggggccaggcatttggaattcagattatttcagattttggaaagtagtaatagagtgtacattccgcatttcatccagtgggatctgggatagcaatctttgtaattaaaaagttaatatttctgcagcaaaacacacaaaatgggataaattaaagccatgaacagctttatattcatgttggtcatgtttagttgccagatgagtttagatcatgtcacattttgctgccaaacaagtcatggagaattttcagctttcagatcacatagttaaggatatggatctgtggtaatagtaatagtaataaaaataataatactaaaacaccaacagaaagtattcaataatattggcacttattatcttccaggtactgttttaagcactcacctgtgtttactcctttagtcttctaacagccctttgaggtgggttcagtattatatctgtcttgagaagaataagaagcacagagcaattaatcacttgcccaaggtcacagctggtaggacagaacagaatgcaaacctagacgatcttgtccaggagcttcgtacttaaccagtgccttgttttttggagtagggaattggaagcaggtgtgtctctaaagttaactctattatttagattagcctggtctaaactcacattacgctgttcatttcttttagataaactcatcctgaaagtcgctgttgttctcctgctgagcaagaatggaggccccactggtgagtctggatgaagagtttgaggaccttcgaccctcctgctcggaggacccggaggagaagccccagtgtttctatggttcatctccccaccatctcgaggacccctccctctccgagcttgagaatttttcttccgaaataatcagcttcaagtccatggaggacctcgtaaatgaatttgatgagaagctcaatgtctgctttcggaactacaacgccaagaccgagaacctagctcccgtgaagaaccagttacagatccaagaggaggaggagacccttcaggacgaggagtaagaagtcttaattgccctctcctgcttcagtcgagagccctgtagtccttgtctccttgacatagtgctggtttctgtctataggtttatgggctattactttcattttcgtgttgccagcggagcagtgccctggtacttgctgtcatagctctatatatgtccctttacagtcccctgaggagaactttcttaaattgaaaccttagaggaatgaaggttttcctagatacaaaatggaatttcaggagcacagtaaatttcagggtctgtctatcttaagctttctttatatcagtggaaatccagcgagatattagaaataaaggccagaaaaaattaattaaccatgatggatgaatctatgttattggactaatttgcttcaagaaacaccagaattttgaaaatcccgaatttttgacagcccctcaggcctggagagttatctacagatgttaggatatgtccacataagaaagcatctaaactgaactgagagcacagcgggctaccctggacaaagtaaaggtggaaactaggtgatgtggcctttgagtatgcagattccttgtatcacttgctcgctactttctagggtcttaatagtagtcaagaaaagggatctgagaaaagtactctttcaggagggactagaaagagaagggggtgatatgttacacaaattaaagaaggatgtcttaggcatttagtaaaaattcagtggttccccgctatcctcgggggatgtgtttttttgttttgttttgttttgtttttttttgagatgaagtttcattctatcgcccaggctggagtgcaatggcacaattttggctcactgcaacctccacctcccaggttcaagctattctcctgcctcagcctcctgagtagctgggactacaggtgtgcgccaccatgcccgactaatttttgtattttgagtagagatgggagtttcaccatgttggccaggctggtctcgaactcctgacctggtgatttgcccgccttggcctcccaaagtgctgggattacaggcgtgagtcaccacacctggcccatggtgggggatatgttttaagacccccagttaatgcctgaaaccgctgctagtaccaaaccctaatgttttttcctgtatgtacgtacatatgataaagttcagtttataagttaggcacagtaagagactaacaacagctcacagcaaaatagagcaattataacaatatattgtaataaaaattatgtgaatgtggtctctctttctctctctctttcaaaatatttcattgtactgtacagcagataaccgagccctgggaaagcaaaaccacagataaggggggactactgtctacatgagttccctgcagagatacaatatgcatccattgttcttagctatcacacaagaaatgtcaaacgtcagggaagtctgaagcacctgtgcttttgtttccctttttgtggatttgagtgggaagaatggcccacaaataatggggtaagaggcacgtcctagaggattggaacctgactgtatttgggagagggttgcttatttgatgactactgtaagactctacttttacacatagaggggccaaatatctgtctgattcactcttacagccccactgtctaatacagtgcaatgtgcaaataatatttttgaatgaaatattgaatatcaaataaactagatgagtgataatagctagtagccttgtatgtacatgtaatatatttctaagcccacaccatttccttcttttctttttaattaatgctggccggaaggtatgatcacagagaacatttcattctgctgactagtactatagctgtgggctatgtgtttaaattttaagtttcaaacagattctttttagattctgagcctgttatctgctcaacatttataagtcaaaaaagaatggctctgggggtttattatgccgaatattttttcgttctagtgcaccagccaatgaactagaaatacaaagactatgaattctaattttggtactctctctaactcgctgtgtgaccttgggcaagtcatttaaccctggttgactgtgtaggtcctcatctatgaaacctccagagctcaatcttgatgaagtgaggctaaggacttgtaaagaacctaatttcttacctcacccaggatgcccaggtgctctgaaaatgacatttcaagatgcgtcccattccttttgcttccaacaaatcatttcccccctatcaaaacccctcctctgcctcattaaggatgaaggcccaatgagcagattcttactgtcttctagcacattagaagaggccactcaatgttaattaccatcacatgggattattggcctcctcagcctgatttttctgacttgactgcctcattgactgcctcagttaagagaccaaagattgaataattccttcgagataaggtataatttggggacagtgtagcgggaggaagctgggaagagaaaaattaacacaacactttctaggcattcagttctaacccctctttataatttaaaataaaaatcagaattctgttacacactttgtttcatagacactatccagatatttcaactgtgaaattatggctaagtaaaggaaaagggtgacttaatatctcacctgactacacttctcctgaacatagctctaatgttattgttataaacttgttccggtttagtatttagagggctgtttcatccacaaatgagtgaaaagtgctgtggatgggttagaggtaaataatagaagcttaaaacaaaagcagggaaatacttggttaaactgcctccttaaagacagcacaaatcatagagcaaatgtagtgattcccttagaagctttctttagtcttcatttggaactatttagccaagaggggagttggctaagatttgtcaacttatctctgatctgtcagggcatggaagttctaggcattaaaggagagtcagatttgaatacacattttttggttttgcattcaagaaatatcccagaatctcttctttgtgtatatgtgaccaccctcttcctttgccataagagattgggcctggaggtcacagcctcttaggggtcactacaaaatggaaattgacggccctcagcttacctcctacgtcactggggatccctatcagccctcttacgagtaccctgaagacagaggggctaaccatgcaatggctgtttcttcagatagaattgttataggtgatgttaaaaataaagtgcacacaataaactgcctgtcatcagatatactacatgttgaagacaagtaaataccaaatagtcagctagggaaaactacacataattgtgatttttagaaaatttaattctctttttagaggttatagaaagcggatatagtattgattctatttaaacatttgaggacatctagaaagttgagcaaacgcattaatgtgctgctaataatttctactttctttctttttgagacagagtctcactctgttgcccaggctggagtgcagtggcatgatctcggctcgctgcaagctccgcttccttgtttcaagcaattctcctgcctcagcctcccgagtagctgggattacaggcaaacgctgccacgccggactaattttttttttttttttgtcttttagtagacatgggttttcaccatgttgtccaagctggtctcgaactcctgagctcaggcaatccacccgcctcagcctcccaaagtgctaggattacaggcgtgagccaccacgcccagccactaatttctactttctaaacataaagtgcaaaggtgtactcaaattaatacacatttgggtgtggatattggcatgactgcacaccagcaaaacactagacaagggaagtagccaggcttgagggaaatgtcagcaagttagaattctaataagccctttaagctgcctgccatattgtcagaaataggtatataagggtttacgtgtgcatcaggactgagagaaccctgatggctatgttgccagttccaggccctggagttctttgtacacgtgtcctggcaccccccagtctccaccctcctccactgggtttgctcatactctgccagcagcctttcccaaagcccctgctctctgtggcgaaagatacttaagtcaattctacaggcacctaagcccaagctataaaatatgcacctgaaaaagccttttctgttatacagggatggagagagcaaattgaatctcaggtgtcatggcagcataatgataggaactgaggcaacctgtttaatcttagttctctgatgaatgatagaggagatagctttcaaagtcttctttccccaaggtaagagtaaatagcaggatgcttctcagggaagtaaaactttacagtccacctccgggtactcacaaaaggggtgatgcacactcccaagaaccctgcttatgatgggatatatgatgggatagacagcccttccctttctcttcctcacagaaagctgtttccccctgccctggctgcattggctcctctgttgctgaggctgctggctgccagcatctgcctgtgccttccttgtgcccttccctgggctggagatctacatagaaagtggccatgcacccctgctacctttgccattcctccttctgtagatccatgaaaacacaatgttcaggatcatcgtacgtatgggtttctcacgcagagccagtttctttttttttttcttttcttcttttttttttttgagacagagtttcactcttgttgcccaggatggagtgcaatggcgccatctcggctcactgcaacctccgcctcccaggttcaagtgattctcctgcctcagcctcccaagtagctgagattacaggtgtgggccaccacgcccagctaattttcacgcagagccagtttctaaactgctctcctaggttatgattaggaacttggtatgttattctgatgcccataccgatgccaattacagaattcataaagacttggaattgttaagtggttaggaatatgggctctgtagccgtgctgcccaagttcaaatcccacttttaccattactggcagtgtgagctgagacaagtgaattaaattcactatgtttcaatttttttctcattagcatctgccttgtataattgttgtgaagaatgaatgaattaatccatgtttcgaatctggtttagagtactacctggctcatagtaagtgctcagcaagtgttgactgctattgttattgttaaatgggcactgggtaagtatggaaagggtatacaactgattataaagagaagaaagctgctttatcttaaagcttgtttataaacttcaaaggataaaaagtatgtcagcaaggaaaaaggaaacctggacaaaatgtgaaagagaatgaggatggcttgaaatcctgagaagataaaagtttagggaattgtcgctaaaaatgtagaatcagaagataaaattcaaagcttatcagcaaaggctcagatgagaaaagcgggcactctaaatgatcccgagagagcccctgcttatcactttaaggatgtaaatagtctcaaggtcattggaaagtgtgtagctcgttaaagttctcagcttccctccagcctgggagagatacaaaaggctcctgcctattttgggctttgctgaatttcatttctgtgggcacttcctgcagggacaaatctgaaggtcagtgcctgtatgcatgttcattcttgcagcagagaatgtaatgcagtgatgtaaagagtagtcctgcagtgacctttccagcgggtgtggtgccttggagttttgtcttggagaaagcaaatcctatttgcttcttggctctagaatgctaatggcacttggatttagaattagcctggattaatgcagctctaatagtgcctgatggagattagggtatcacccatggtttaagaagtctgctctgaaatcctgctgagtagatggctaacgagtacttgatgagttctcttcaaagtgttttcttgtaatggtaggaaaataatgaataagcagatgccccaagcactgccattacattgtgttttcttgggttccttctatttgttccatcaccaattatatgcattgtgcactaagaaagtctttttgcttttaaaacccatatatcacgtcgcattcctgatacaaacaaaatcaggaatgtgatgtgatatatgggcattttgtttagttaatagtgccctcattactttctgatttcaagtgtctgtgccctggtgtatatatacatacttgcttatttttgaaatcttgctgtcacgggtatcatttgtgtttgacatgcataggcacctgaaggagagtgcagcatagagccctaatttatcattatctaatattttagttttttttttttttttttttttttttttttacagtgtcttgttctgtcacccaggctggagagcagtgacacaatcatggctcactgcagcctcgacttcctaaggttcttcccatggatcaggctatcctcccacttcaagcctctcaagtagctgggactataggcccatgctaccatgcctggttaatttttgtattttttgtagagacagggtttcaccatgttggccagtctcatcttgaactcctggagtcaagcgatctgcccatcttggccttccaaagtgctggatttcaggcgtgagccatcgcgcccggcctcattaatattaattcaggtgccattggcttccatggcggtcattatcttaagggctttgtttactgatttacattaatctcttggtgttgaataatttatgtatcttcctgatgtgtgtttgtgactttgaaattttccccaacctccctcctctttttttgtaagaaatctttctgaaataagttaaggaataagaattgtagaaatcctttcttataatgtacatatcagaattttaaaaagaaatgtaataaatgtagctccatctttccccactaaaaacaaattgtgtagacagaggtgtatttattggtttcttttatatacagtatttacctgagagtgtccgtgatgttggaatgacacaatgcaggatttagattctacattgttagagggcaggatcttgcaacccgtgggttcgatagaacattttgggtagtaagtaagcactcactgtattggcattattcccttacctacattagatgtcaaggagggaattcctgatcatttagattgtaggcctctgaaactgaaacggttataaactagataatgattctgatcttaatgagattcagccagaaaaactgcccagatctctctttctctgtgttcctctctctctctctccctttctctctctctctctttctctctctctctctctgcccataggaaaagaaacatgggcatctcttagattcagaaacatgagctatttggatgaggggcagatttattttcagagccagaggcagtttgattatagatgctgccatttgtatctcaatggtaggaaattcctcttccctcaagcaaacacctttcacactgaagcccctggccaagctccatgcactttctcccctggatgtgcctctgattcagtttttaagctgctttgcccctgcatgctggaaggcagatgatctcagcctggcacacacagaagcctctctcctctcccggcccagctcttccttcctccaggcggggccaggccacagatgtgtgttaatgagagcttctctttgtttacagggtttgggatgctctgacagacaattacatcccttcactctcagaagactggagggatccaaacatcgaggctctgaatggcaactgctctgacactgaggtacctctccggggcccctggtttagcagggcttgagatgtggaatccagttagaaaaacattcagtaactcaacagtcttcctcaaaattgttgatggaggctcatgcctgtaatctcagctttgggagaccgaggtgggtgattgcttgagttcagtaatttaagaccagcctgggccacgtggtgaaacccccatttctaccaaaaatacaaaaaattagccaggcatggtggcgcatgcttgtggtcccagctactcaggagactgaggtgggaggattgcttgagcctaggaggttcaattaaaaaaaaaattattgttgggaaggaggagttgtagaggagggtgaaaaataaggaagacatccagtatatctgaaatgataggaatggtcatctatagaaaagcagaaacacagatcacttctattaggttggtgcaaaagtaattttttttctgccattactttcctttttttttttttctttttttgagatggaatctcgctctgttgcccaggctggagtgcagtggcacgatctcggctcactgcaaccttcgcctcccgggttcaagggagtctcctgcctcagcatcccgagtagctgggactacaggtgcatgccactatgcctggctaattttttgtatttttagtagagatgtggtttcactgtgttagccaggatggtcttgatctcctgaccccgtgatccgcccgccttggccttccaaagtgctgggattacaggcgtgagccaccacacccagcctgccattactatcaatatttctaacctgtgtactacaacatgaaaaataaagtggcctgaaataagaggaggaaactgtcatggcttctcttgggttcaaataatggtggtttaaaaaaatcaggttttctcatcttaaatgaacagttcaggccggaaataagaggaggaaactgtcatgggcttctcttgggttcaaataatgatggtttaaaaaaattagattttcccatcttaaatgaatagttcaggcccacaaaaacagtgctgagaacaagtgctgacggatcttgcacttgacaatggccagaggtggggcccagatattagcaatgtagccacacagtggggaagaagtctctctttttttctcagacagggtctcactgtgtcgcctaggctggagtgcagtggcacagtctcggctcactacagccttgacctcctgggctcaagtgatcctccagccttacccaccaccccctccccgagtagctgggactacaggcatacgccaccatgcccggctaatttttgtattttttgtagagatgggattttgccatgttaccaaggctggtttcaaactcctgagctcaagcaatccacccaactcggactctcaaagtgttgggattacaggtgtgagccaccatgctggcctagaattgtttatgaaactcaaccaaggggacgtttatgtgtctggaccagagtcacactccatgagttactgactccaagggagaaagtagcttaggggcttctgaaaaataaagatgatatttattttgagttgatttgcaaaggccataaagggggtgacctttcagaagatccaaattgcccctcctatctgaatctacatatggaatggtttcttagtcagtttgggctgctgtaacaggatacgttagactaagtaatttattaacaacagaagttgattttcacagctctggtggcagggaagtccaagatcaaggcactggcagattcaatatctggtgaggacctgctttctggttcacagacggcaccttctcactgtgtccccacatggtagaagggtctaaagtgctcccttgggcctcttttagaaagatacttgtgggcatcccacctccatgatatcatcacctccacaaggtctcactgtctaataccatcactttgggcattaggattttagcatataaatttggggggtgggacataaacattcagagcacagcaaaagataaaatcatttaatggctctatgttaaaagcaaatttctgcctcacttggttttctagtttcagttgtgaaggaaatttgacaatttatcgtcaggaagggctgtcacagccctgcaggctcagcaagtgatagagttggatgggtctaatctttctaagtgtttcagaattgagtccaagtaaaagagcaagaaacagattccccttactcggcaatatatttgtagattattgctcaaaatagcacagcaaagagatcagcagttgactgatttgttgaaaatgtagccatatatatccttctccatttttctagtaattagcaatctaaggtactcaaaacctcaaggcttcattgacgggagcaagtgagatgatgactttgagactaagatttcctgcaagcctcctcagcacagacataggaggctgtgtctcaggtcctgttttgaactctcggctgtgcatgttctcttgtaatgcttacaggtatgatgcttagtacttacccaaaccgcaaagaagatggaggcaataatggaataaatctagttactgaaattaaatcaggtccgtcatggtacaaaaggcagattttgctttgttatctcttttgacacctttccaactcattttgtgaattaagccaaaggatatataagatagcctgcccttcaaaagggctttaatttatcctcatttccagatttccctcaagagggttaatatttcagggcaaactgaatgaccctgagaaggatgatcttgagctctgttccttgtagtatttcttctatctaacccatgggaaaaggacagggtagcaaaagtagatggattaaggctgttttatttcatcctcttttattatctggattaattacagtaggagctctattaactgccctaagtttaaacgatttaccagattaaccagtgctctgtattccttctgtaaaacatacgaccaaaagcgtttggcatgctgaatgtgcacagctgtgatgcttctctctagtgagcactcatacctccacttaagtggtccatttaaaacaattttttttattttttgagatggtgtctctctctgttgcccaggctggagtgcaatggcgcgatcttggctcactgcaacctccgcctcccaggttcaagcaattctcctgcctcagtttcctgagtagctgggattacaggcatgtgccatcatgctcagctaatttttgtatttttgtagagatggggtttcactatgttgcccaggctggtcttgaactcccaacctcaggtgatccacccgccttggcctcccaaagtgctgggattataggtgtgagccgccacacctggccaagtggtccatttttaagaatcagttgtccccaaacctgtttgtgctgtccttgtgactgcactaagaaatttaattaaatattgtaccaactattgaattgtgactgcaaagagtgtcattttttgttaaaatcaaagtaacacgtctacatagtttaaaaagttaattaatgctttgaaagtaatgcactgtaagtgcaagacaaaacaaccacccaaaacagtagacccctgccttcttgtctttccctactccatacaggcaactgcttgcatttcttttagctgcctttttttttttttgcataaagctccacttttatagtggggccatgcggggccacatggggaagctccagtgtcccctggaggcagaaggagccaggggagagccaggccagtgcctcaggaatggcgagatggggtaaacagtttaggactggctagtttgagtaatttctgcaagctgtaaacactagggatggtccttagtgcctagtacctgactctgggatgactaaggaagaggactctgcctcctgggatgtaaaggtcaggtagaggcggcagggcttggctttggttagtttgcatatagaaggcttgctgagccctttgctatctctaagaattggctaattttttgtgtgtgtgtgtgatggagtcacactctgtcactcaggctggagtgcagtggcacgatctcggctcactgcaacatccacctcccaggttcaagcaattctcctgccccaccctcccaggtagctggaattacaggaatgcaccatgacgctcagctaattttttttttttttttgtatttttggtagaaacagggttttgcatattggccaggctagtcttgaacttctgatctcaagtgagccgcctgccttggcctcccaaagtgctgggattacaggtgtgaggcactgtacccagccagaattggctaatcttgaaggtacagtctatccccaccagaaagatctttaaaatgttaaaaatcataattttcagaaaattaaaaagtataaataacacaatgcttaaataaatcagatactatattgtgtcaattccatgtttttttcttgaaaacatcccagttagtacctttcatctttctgctacaaactggtctggtcattcgctagatcagctgcacagctgctgtcctgagaacgtccttcccttcatgctggggattcttttgtcttccactcctgtcttctggttaccatattttaaaaatctttctagatatagttccttgttttggtgaaaaaaaccaacaacaaaccaaactattcagcatatttttgagaaaggagtacagaggaaatggtttttaggatatataagaatattattatttagcattctgagggctttgttctcttctagcattaggtcgtgttgagaaaccccaaatctgttccgattcccagtccttctttttaggctgactctgttctccatctttagattcctgctcctttattatatgacttttttggttctttctggaagcttttaggatgttcttttcctttctcatttgaaattttacaataatgtgctttagaatgaattttttccttcattatgttgtcctcagtgagtcctttcaacatagaagctcatgacttcaaattgtgacgttttcttattattttttctgaagatttattatttctatttactgcctctgtggagatgattatatagcttttctcctttatgatgttaatgtgatgaatttcataaattaatttgcaaatgtcaactcaaccatgcattcttgagatacacacaacttcatcatgatatattatcattttattttattctgtttttccccccatatcgtaattgaaaggtaattggcatataatgagctgcacatattaaagtgagcaatgcggtaaattttgacatctgcatatatctgcgaaaccatcaccacaatcaagatattcaacatattcctcatccctctctctcaccgcccaatctctgggcaaccacttatctgctttctgtcgttgtagattagttttcattttctagaattttgcatgaatggaatcatgcaatatgtacattttcttttgtctggcttattaaactcaatgtaattaggtattcatccatgtttttaagtatagcaacagttcatttctttttattgttgagtagtattctgttgtatggatatatcaccagcggcttattcattcgcttatagatgaacagttttttttctactttttgcatatttcaaatgaagctgctgtgaacatttttctgtaggtctttgtgtgaacatatgcttccatttctcttagataaaaacctatgtgtggaatggctgagtcatatggtaggtgtatgttcaactttttttttttagcttttattttaagttcaggggtacatgtgcaggtttgttacataggtaaattgtgtcatgggggtttgttgtacagattatttcatcacccaggtattaaacctagtatacattggttatttttcctgatcctctccctcctcccacccttcatcctccagtagggcccagtgtgtattgttcccttccgtgtgtccatttgttctcatcatttaactcccatgtctaaatttttaaggaactaccaaactgttgcccagtttgagagctgtaattgtcccatattctcactaacacttgttatggacaatctttaaaatttagacatcttcatgggtagtaacaaaattgataccttatttcagttctaatttgcttttctctagtgacatagaatattgagcatcttttcaagtgattatttacaatgtgtgtgtgtgtgtgtgtgtgtgtgtgtgtgtgtgtatttttgagacagggtcttgctgtgttgcccagtctggagggcagtggctcaatctcagctcacagcaacctccacctcccggactcaagcaatcttcacacctcagctccccaagtagctgggaccataggtgcacacctccacacccagctaatttttgtatttttagaagagatgagatttcaccatgttgcctaggatggtcttgaattcctgagctcaagtgatccacctgccccggcctcccaaagtgctgggattacaggcgtgactgtgcccggcctgtatgttttctttggtgaaatgcctcttcaaatcttttgtgcatttttttagtacattgtttgtgttcttagtattgagttgtaagagtttctttttttctttgagttggagtcttgctctgtcacccaggctggagtgcagtggtgcaatctcagctcactgcaacctctgcctcccaggttcaagtgattctcctgccttagccttctgagtagctgggattacagatgcacaccaccatgactggctaatttttgtatttttagtagagacggggtttcaccatgttggtcaggctagtctcgaactcctgaccttgtgatccgcctgccttggcctcccaaagtgctgggattacaggcatgagccaccgtgcttggccataagagtttcttataaattctagataaaaattatttgttgaatgtatgttttacaaatattttctcctagtctataggttgccttttaattttcttaacattatcttttgaagagcaaatgttttttaaatgtgatgaaggctgagtgtggtggctcaagcttgtaatcccagcattttgggagactaaggtgggcagattgcttgaggccaggagttaaagaccagactgggcaacatagtgagatcccctctcaaaaagaaaaattaggccgggcgtggtagctcatgtctgtaatcccagcactttgggaggccaaggtgggtggatcacgaggtcagcagattgagaccatgctggctaacacggtgaaaccctgtctctactaaaaatacaaaaaaaaaaaaaaaaaaaattagcctggcatggtggcacgtgcctgtaatcccagctactcaggaggctgaagcaagagaattgcttgaacccgggaggcagaggttgcagtgggttgagattgcaccattgcactccagtctgggcaacagagtgagactccatctcaaaaaaaaaaagaaaaggaaaattaaatgtgatgaggtccaatttattgatattttcctttttatactttgtgtttatgttgtatttaagaaatctttgttaaacccaaggtcactaagatttttttcttaagttttcttctagaagttttataattttagctcttgtatttaggtctatgatccatctcaaatcagtttctttctgtttttttttttttttttgaaatggagtcttgctctgttgcccaggctggagtgcagtgactcaatattggctcactgcagcctccacctcccaggttcaagcaattcttctgtctgtgcctcctgagtagctgggattacaggtgcctgcaaccatgcccagctaatttttgtatttttagtagaggcagagttctactattttggccagactggtcttgaactcctgacctcaagtgatccacccgtcttggcctcccaaagtgctgggattacaggtatgagccactgtgcccagccttcaaattagttttgtatatagtatggagtaagggtcagggctcattttttaaaatttttgattcccaggttgctgtttcccaggttggtcttgagctccttggctcaagccatccacctgcttcagcctccccaattgctgggactaccgaggcactccacagtgctgggcttcaaggtttatttttctgcatatggctattcaattattccagtaccattcattgaaaatcttattccttccccattaaattgttttggcatctttgttgaaaatcaattgatcatgtatgtgcggatctacttctgaattcttttttctgtttcaatgatatatatatgtgtgtgtctttttttatcatccctaatttattttaaaatgtgtctatctttatgccaatcccacactgtattgattgctgtagctttatggtaagtcttgaaataaagtaatataagttctccaactgtgtcctttttttttctttccaaatttgttttagttattttaggttatttacatttccatataaatcttggaatcagcagatgaatttttgcaaaaaatcttgctggaaatttgactttgattgtgtagaatctacagaccaatttatatatgtagatcaatttatcatgttaatgtgatgaattacattaattggttttcaaatattaaaccagcattttattttaaaataaaccccacttagttatgatattttatcttttttatataatgtgggatttgatttgccgatattttattaaagatttttgcatcatgttctttttctgaaattttattttgttctaatgtcataaaataagttggaaattatcctctctatctctactttgtgaaagaatttgtattacattggtattatttcttccctgaatgtttgatagactatactagtgaaagcatctgggcctagggttttctctgtggaagattttcagttacaaattcaattttactgagtcaggtttgataagttacatttctcaaggaatttatctatttaatcattgaatgtattgaacattcatttgtttataattttgttttgttattgaaaatgtctgtaagatttatagtgatgttcccttttctattcctgacattgttaatttgtgttctctctccctccatccctctctcactctctcttgtcagctggtctgtgggattatcacctttattaatcttttcagagaaccactttttatttctttgatttcctttattgtttgttaactttttagtttattgattccctctcttagctttattacttccttccttctacttagtaggagtttaatttgccctcatttttttagcttcttaaggtaggaaatttgattatattttaaacttaaaaaaacttaaagctataaaattccctttaagcactgttttagctgaattctacatattttgattgggtatgttttcatcattcaattaaaaacatagtttctaattttttcttgcaatttcttctttaacccataggttatttggcagtttgctgctgaatttcaaagtgcttgggaggttttatagctatcttgttaaaaattgatttctaatttaattttgtcagagaacatactttgtatgacttaaatcttttaaaatacgttcagactgatttagggtccagcatatggtacgtcttagtgaatgtaatatatgccattggaaatgatgcacattctgcaattgttggttgtaatgtgctataaatgtcaaccaggttaacttggttgatagtattgttgaattcctgtgttccaaatgatattttttgtctgtttattctatcaattaatgagaaaggtttattaaaatctccaaccattgttgtgcatttatttctatttctttagttctgttgatttttgttttatatattttgaagctctgagtacatctccctgatgagttgacccttttatcattatgaaatgtcattctttctctgtaatgcttatcttaaaatctactttgtttgatatgaatgtagccacttaagctttcttatgcatactgtttgcaaagtgtgtgtgtgtgtgtgtgtgtgtgtgtgtgtatctatctcaatccttttagtttctgcctatctctgtctttttatttaaagtgtgtttttgcaggtagtgtatacttggatcttgtttttatattcagtctgacaatttatgcttcttgattattgtgtttagtttatttgcatagtgtgtagtccattgacatttggcataatattgataatttgtgttggagcgtattgtcttcatttctgattgtcccatctggttttgttgctgttttgttgttcctctgttccacactttttgtcttcttttgggttaatcaaatattctttggctttgcatcttatgtcttctgttggatttttatctataccttgtcgtatttttctttagtggtttctctaggggttacactatacattattaattaatcatagtccatttagaattaatattgtacactttacataaaatgtaaaacatttgtcacagtataaagtctattccttccatcttttgtgctataattgtcatatattttatttcaatctacattatatactccacaacacaaagttattatttttgctttagacagttagttgtcttttaagaaaatcaaaagaaggaaaaaaaagatacttttaaaatatttacctatgtatttatcatttctggcattccttattttttcctgaagattctgattttctatcatttcctttcaacccaaaatgctttttatagcatttcttttggtgtagagccacaggtgacagattcctttagccttcatttatttatctcatttatttcatgtttttcccttctttcaaaacacacagccttgcactgcctgtgtccagtgcctgaaaacaattggctcatagattttgtccagattgtagttgtttatggtaggagggataagtccaataccagttactctgtcatggctgaaaggggccatctcttctgtttttgctttctagaattccttttattcaagtattggacttctgaagctgatcttctgaatatttttccccgcccataattctatctgcttattttgtttcactctccagggaactttctcagccttcagctcgatggaaaagtctaaattttctatcatacctttaatttctaagagccctttccagtttttacagaatttgtgtgtttttaaaatttttttctggtcttagtaagtgtacatctttgtagtttttaaatgaattctgataaataggacacattttgaggaagcaaggtgttctgttatccttctgaaggcaggtatagcagtttcttagaagaggtttcttctgctctctctgttgcttttgatttctcttctctatacattttcatctttcatgttgggggctattctcaaatgtctggcaatccttgagcatcttttcatatttaaaagtgaggctttatggccaggcatggtggtttactcctataatcctagcactttgggaggacaaggcagggggatcccttgatcctaggagtttgtgaccagccccatctctacaactctaccaaaaaacaaaaacaaaaaaaacaaaaaggtagccaggggatggagtgcacttgcagtcccaactacttgggaggccaaggcaggaggatcacttgagcccagaattttcaataccagcctggccaacacagtaagaccctgtctctacaaaaaattaaaaaaaaaaaaaaaagcattagctgggcctggtggcatgcacctgtagtcccagctacttgggaggctgaggctagagaatcgcttgagcttaggagtttgaggctacagtgagctatgattacaccatttcacaccagcctgggcaacagagcaagcccctgtctctaaaaacattaattttaaaaaaaatggctggtgatagctcacgcctgtaatctcaacactttaggaggccgaggcaggtgaattgcttgtgctcaggagtttgagaccagcctaggaaacatggcaagttccccatctctacaaaaaatacaaaagttagttgggcatggtggcatgcgccagtagtcccaactactcaggaggctgaggtgggaggattgcttgagccggggaggcagaggttgcagtgagctgagatcaagccactccccttcagtctaggtgacagagggaaacccttggaaaaaaagaaagtgaggccctagaaggctatggggtcagggcttgtttcctgctggatcacagtgccagtaaggacctatgcgtcttgttcggagatcttgacagttggcatgtatttgtagacttatagcatccatagagaggtgttctccaatggcttgatggacagaataaaccagctgccagtgtccttggagcctactcagggaaggaggccagaggtctgtctggtgagtcattctgtagagtcttacatcctctctctgtttttggtgagaaccctcaccctcacttttaggtggcctggtgctctgagtccagaacctccagttcaacctgctcagagtgaagtctacagtccttttgagctgagaggatgcagtccctttttatctgggttggaagaagacacttgggtctcattattcttgatgaagaataccagcaaatcttccttacatagccccgccatgctgcccctcggggtctgcaattcctgagccattcagtatctgctgtgtgaccccctttaccttgggcagcctgctctcgccaagtttaaccctgctgagcctgctgggccggcgtctgttttctggcatttctcttgctgttgccttttctcctgttcactttgtcccttttgggttattcttttttgatcccttgactctcattttagtagggtttgaggaggaagggctgataaatttgtgcccaatctcctgtgtacccaccttctactataaagaaatggaaacaggaaatcattttaaaaattatgttatgggctgggtgtggtggctcacacctgtaagcacagcactttgggaggctgaagtaggaagatcacttgagcctaggagttagaagccagcctgggtaaagataaagagggagtattggactcaatctttacaaaaaaatgaaaaagtttgccatgagtggtggtgtgcacctatgttcctagctacttgggaggctgaggtggaagaattgcctgatcccaggaaagggaggctgcagtggactttgatcatgtcattggactccagcctgggtgatattgtgagactctgtttaaaaaaagaaaaaaaaaagttattatgtggatgatgcaagagagactgtggaactctactcagagtttcattgtaagcttggtcctacactaggaacttggtgaataaataaatgtacatttacatttttaggtcaaaataatttgcttgagttaatatgtctgtaggaggcattattatttttttcacaatttaccacttttactggggctttcgattcatcaatctattctattcctgtgatgtaaaacacagtctccttttaccttataacctttatttaatagcagatagtggttgtctggataagaggaaattggaagtccaggatagtgaattatgtctttcatatttttgagacaggatctcactatgtcacccaggctagagtacagtggcaacagtcatggctcactacagcctccacctccctggctcaagcaatcctcccacctccatctcctgagtagctgggactacaggtgtgcaccaccatgcctggctaattttgttcattttttttgtagagacagagtttcactatgttgcccaggctgggctcaagtgaccctcccaccctggcctcccaaattgctggaattacaggcatgagacaccatgcccagtcacatcttcctcttttccaggtgactaaatagctaagttacctgtggaagtggactgaatctagatgatagtactgctctcagtcctctctttttcaattgttcattaattctttcaacaaatatgtgttggctgcatgccctagtgcatctccctatgggaatgcacagccattgacttaatccacgcagatgtttcctggttgttcataagcataaaagggacatagttaccaggcacagtggctcacacctgtaatcccactcgggaggctgaggtgggaggattgcttgaggccaggagtttgagaccagcctgggcaacacagtgagacccctatctctaaaaaaattcaaaacaaaaaaaatcttagtcaggtgtggtggcacctgcctgtagtcccagctacttgggaggctgaggcaggaggatcactcgagcaaaggagttagaggctgcattgagccatgattgtgccactgcattccagcttgtgtgacacagcgagatcctgtgtctaaaaaaaaaaaaaatgggacacagttgttgtgaatttctttttttttttttactttttgtctgaaggtaaaaatgtatctttgttctcttaatttttgtcaggggggcaaccactcatgtcaaacaatagtggtaaggggaggaaaatattatgcaaagggctaaatatgctgtaaaaattaccttttctatgaatggggtcatttgaaacactttaataaaatacactggttaatagtcattattggaatcaagggctccacataattttaatcatcattcagaatacttcactgtgcagcaagatttagcaatgttataggccttggggaaagttttctgcatttcttttcaagtttcaagctttcatgttatagtcctagagacacactcttcccaaaagcaggaggaagaaacagcttgctgaatggtatagccagacccctttctggattcaaatcttctcaattctgggaataaatcatttggaagaatgacttttcttggaaaagcatagttcacgtcaatagtatccaaacagctagcaaggtgtttttttttttagacaggatctcactttgtcatccaggctggagtgcagtggcataatcacggctcactgcagcctcactgcagcctccatctccatggctcaattgatcctcccacctcagcctcctgagtagttgggactacaggtgtgccatcatgcctgactaatttttctatttttttagagacggagtcttgccatgttgcccaggttggtctcgaactcctggactcaagcaatcctctcatctcggcctcccaaagtgctgggattacaggtgtaagccaccacatctggtaacaactagcagttttagctgacaaagaaattcagccctaaatgacctggcctgaagttatttttgacatgtatcttccccactgctgcacaaggggctaaaggaactctctaccgtgatatctatgtcagtgtcttatgctaggattaagagtatttatatgcacaagggctgtcatttttcaaaaacctttctttcttcctctgtcattgtttcccctccagctctccaccctgtgcacaagatactgtcctggtcaaggaggggagggaaggagtctgtaaacagtgcccgtaaagaggcaagggcttgtgaagtgatggatgctgttggaacagagcaaagtctggcaggatggacagaaaatgtgggaaccaggcctagggagggtgggaagggtgagaggatcagaatcaaacgctggagagggaggtgaagaggctggggcacgatggaggtggggaagcccaaggattagggggtaacccgcacatagagggaaggagccagggttttcttggccgtattttatgtctgcctctccttttattttattttttagtggcagacttctgagaaataagaaaataagggatgagtatggttcccataagagtaggaactcacagtacctttcataagcttataattgattttcccatctctgttttcccaagcctgacaattcagacctggaggctttgcgcctgagagggggaggggagagaaactctactagtgcatcattccggccacagcccaggcttattagcatttgagcagcaagaaggatctatccctagaagcttcctccctgccttcttcctggaactccccaaggagtgaggaacttggggagggaggagatgatatagttgaaagaagcaatattaacagtcagggagttaaacccactacaatcagccacatttcagaaaaggtaaacatgccatttttatatagacttagtgcccaccaccccctaccccctgccaaatcctggttatagactaacagttgctgttagatgcttatgaaaaataaccctgtttcccaggatgagcctaacttgggctcacactaacttgggctgggttcatattgatacatttcttcctttttctcccctaatttttgtctggaggaaaaaatgtatcttcgttctcttaattttgggctaacttctactgcaggattttctggcctgaagaaagttcttccatatgagtgtagttgtgaacaaagcgtagctccaggagttttgttctgcatagtggggagcggtggaaaccacgaggctatcgcaggtggtggacttggcagagagaggagcatatgggtttgacagcggaaatagatgtcaccatctggtacccgggcccttcagatgattccattacctccctgtcctaccccatatctaggttgagtgcggatggcatttgagatatatttgcttaattttttttttcttttttaatgacatagtcctggttttaagcaaatggagataaaaggtgatgtgctctgttagggatgtctgccaaggcaaagctcacagaagacgggagaagtttctgaggatagactacctctgacattattgcttggattggagctgggctgtttcctgttagaaaaggcagaatacaagccccagggaaggggccaatcggtgtgccagctactggagcgcaaggaggattcattcctggatgagaggtgactcagcagagagatttcctagagacacctcctgcctcctccttgtatgacgttcaaatcagacttctagacatacagcttgttaggtgtttagtgattaacttttctgtgggacttgaatgtaaatgccagactatggcagtttgggatatggtcagttaagccagatatgctttgaatagcttgttagatttaaacatctagaattttgatggctgtgaactttgaggatcttacttgggattatggaattatagagacacagggcaaatgagataaatggggttctcttttgtagttttgttgttgtttagttcatgtggtcaggttattcagtggcatgtcccatgcagatttcttacatctgccatcagctatgacatcatgcctggattccagtaacaggatggcatttcatcaaattctgaaagtcatcattatttggactagaacaacctattccttaaaatgcctagtaagacgaaatctggaaacaaccccccaggttggaactccttaacaaaatcagggcacctttgctgcagttggctgcagtgtcacttacctggagaaggcgccttgttcaccccaggatgacctgtctgtgggttaaaaaacggtgctgtcccctttgagtcagaatggtgctggccattcccctgtcgtcttttcctgccaagttggattcagtgctgcatgctggatttctggcatgctggagttagtgatggggcaaagatatgtttggaattggatgaaactctggacacctcttcagctccactgtttagacagcagctggctggagtggcctcccagtcagtatcatccattctcgagactagaggcaatcccacttctgctgatggtcacccagaattccatctccccacctcctctccagatccatgagaaagaagaggaagagttcaatgagaagagtgaaaatgattccggtatcaacgaggagcctctgctcacagcagatcaggtataagtatctctccaggttatcgggaccttttgttcttttgatggagaaaaagtccaagagaacacacttgccacatccatttaaggcagaagaaagatatgtggtcatgtggtgcctgtgctcatgactcagagtattttttgtttcttttttttctttatatatatatacttttgagacagagtcttgctctgttgcccaggctggagtgcagtggcgtgatcttggctcattgcaacctctgcctcccggattcaagtgactttcctgcctcagcctcccgagtagctgggactacaggcatgcaccaccatgcctggctaattcttataaaaaattttttggtagagatgtgatttcaccatgttggccaggctggtctcaaactcctaacctcaagtgatctgcccacctcaacctcccaaagtgctgggattataggcatgagccactgtgcctgaccttttttttttttcattttgagacagggtctcactttgtcacccaggccagagtgcagtggcaaaatcagggttcactatagcctcaacctccttggctcaagcgatcctcccgcctcaggcccctaagtagctgggactacaggcatgcatcactatgcccagctaattttctgtacttttagtggagatgaggtttcaccatgctgcccaggctggtctcaaactcctggactcaagcagtccacccgccttggcctcccaaagtgctgggattacaggcatgagccacggtgactgtccaactcagagtatttttgataagggatttcatctctctttctgcctcaggttgcccacctgcagtgaacatgaatgtcattcttgacacttgggatagttggggtcagtctctgataggagccagagacaggcatagtgtttagtagctacaatcctgctaagccttcttattgaaattcgttgtactcggagtcaagacactcaaacaagggtcccaaatacctgttttcccaaaaagagaagtgacagatgaggcttttgtgtgatggatattttcttacatttcatagaacactcaaaattttgggccttccgaaaggagtcttagagccacttcgactttgtgaaaaaagatagagtgcttcgcattcaattgagatcatcatagctttaataatttattacttagagaggataatgttcagtttctggattccttatttaatgttttagtcaacaaatatttatgggtgcttattttgagctaaacactacataagtttccacaaagtctttctgcaaagctccactggcagccttcggtgccagaaagtgcttttttagcagcaatggtgctttttcatatctgtgatagaaaggtgggaattgaaacacgtgaggattaggagactgaagagaaccagatttttaaaaataggggctaatagctattcttgtgacttgtaggaggatctacaattcaatgatatgaactcaattataactcctcttagagaaaaggacattcagccataagaccctgacagggacttgtgtcatttggttgcattctgtaaaatggctttcagtagtcaaagactgggtatttcctaagtttgtgagtagaggtgaaaaggtttgggaataagaatggaaattattctaaaggaggagaccctgaaaccccttacctttggtccagcccactgtgaagaaaccacctcaaagagtacaatgctggcctcggggactttagtccatccatggagaacagacaaaggtgaaggttgggacaaaactcatctaaagacctgctttcagcagcagtcttctttatttgtaaataattaatgtacaaagtaagtcactcttttttttgttgttgttgttgaaacaggatctggctctattgcccaggctggagtccagtggcccagtctcggttcactgcaacctctacctcttgggctcaagccatcctcccacctcaacctcccaagtaacatggactacagacacacgtcaccacaactggctaatttttctgctttttgcagagatggggtttcgccatgttgctcaggctggtcttgaactcctgagctcaagtgatccacctgcctcggcttcccaaagtgctgggattacaggcatgagacaccatgcccagctagtaattcacttttgttccttttggcagatatctaattttccctccacttctgggagctggctcctgtcaatagtctagattagagctggggttcttatctatttgctgctctctagactccacctatccttctattatttcattatctctattttcatttgttgctgggcagcttcagttcctgtctaggtgaattctggagaaatagttgttttcctccccattttgtgttgttctaggagcacgctattttttacagtcacgtgtattatgtcaattaatggactgggttttgtgttaaagttgggtgaatgaaatattttcccacttagaaatagctcagcacattgaagtaaatgttcccttccaggcagctctgccttgcttcctgaaagagcagcttatttccaataagtcatttatctaaaaggagctcttggaagaggttttacattaaagagtgccttacattaaagaaagagtgtatgcaagcctttggttggaactatttttattattcagtatttatgtaaaaacaatattgctttagaaattttcagatagctaattaggaacatccttaactgatcaaaattcaagccagaatgcccctctagcagagaacagagttagcactctctcgtgtaccttcttcaggtaattgaggagattgaggaaatgatgcagaactccccagaccctgaggaagaagaggaggttctggaagaagaggatggaggagaaacttcctcccaggcagactcggtcctcctgcaggagatgcaggcattgacacagaccttcaacaacaactggtcctatgaaggtgagggccctgggcgctgggctggccgaggaggaagcacctgctcggggccaggctctgggctgtgtgctttgtacatggctaatagaaccctgactgcctcagagcagagccttgcagatctaggtggtcagcaatacctttcttactcggcatcaggagagaagtttgcatttttgagaaaagaacaaggtagtcgagcaaaatttaaatgttaaaactaaccaaagaacaagactaaggcagaataagcagaagaaatctgaactactatataaaagcaatgaatgatgctaccataaaatcaatgaataaaaaaggtaatagtaacagctcatatttctgaagtgctttctatgtgccagaccttattctaagactttctttcttttttttttgagacagagtctctctctgtctgtcacccaggctggagtgtagcggcatggtcttagctcactgcaacctccacctcccaggttgaagtgattctcaagcctcagcctcctgagtagttgggactacaggcacgtgccaccacgccctgctaatttgtgtatttttgtagagacgaggtttcgccatgttggcaaggctggtctcaaactcctggcctcaagtgatctgcctgcctcagcctcccaaagtgctgggattacaagtgtgagccactgcgcctggccttattctaagacttcctatgcctaatctcatttcatcttcacaccaaccccatttggatcaagctaaccgagtctttcagaggttacatgacttgtccaaggccactgttagggaaatatgattagaaatgagatttccttcctgttcagaaaacctctccacaaagacaggtgagaaagaaaactattttgttactatttttatttatttatttattttttagagatagaatctcgctctgtcgcccaggctagagtgcagtggcatgatcttggctcactgcagcctctgcctcccagcttcacgcgattctcctgcctcagccccctgagtagccgggattacaggcatgcatcaccatgcccagctactttttgtgtttttagtagagatggggtttctccacgttggccaggctgttctcaaactcctgacctcaggttatccgcctgcctcggtctcccaaagtgctgggattacaggtgtgagccaccatgcccggcctagaaaactattttattattgaataagcactaaaccaggatgggagccacatcacagacaactctctgaagagactgcaaagacagaaagcagtctcactcttgtgtagctaagtggatgaatggaacccattacattgagtaggttttgcaatttggagtcggaagggagttaggcccctctgctcagaacaatgagagatgattatgtttctttttcttttctttctttccttcttttttttgagacagagtcttgctctgttgcccaggctggagtgcagtggcatgatctctgctcactgcaacctccgcctcccaggttcaagcagttctcctgcctcatcctcccgagtagctgggattacaggcatgcaccactacgcctggctaatttttatattcttagtagagatgaggtttcacatgttggccaaggtggtctcgaactcttgacctcgtgatccgactgcctcggcctcccaaagtgctgggattacaggcatgacccactgcgcccggcccgatgattatatttcaaagcagtaacctccaggcccttgaagaaagcctcctgaattataagaatgacaagaggcttattttagccatgacaataatttaatgtaaatgtaacatatgtttattttaaagatttaatctaaatctttgagagattgaaaaggataggtagaagaaattctgaaagaaaagggaggtgggggagaggaaaagtctcttcccttattttcaacggggagaatcaagcctctcatttaaaatttgtatttgtgcttagtccatgcagaagccataaggggtgaagctaacatttgaagccaggtaggttaactccagaggccatcctcttaactctctgacacaggtttatagtaattatgactgtgcacaagaaacggctggatgaagcatgaaatgaaaaagtgtaacacagcaaaggcagaacaattcaccagccgtagggtatcaaatgcccacgctgcagaaggggccccatcctaggagttgatccacccatggggagatgggaacttagaaacaggggagggagaaggtgggttggtcagggttcaaaggtcaactgcgggttagaagtggtgaaagcagaggcagaatctggaggcctgcatcctgcaagtcagactttggctttgaatagcagcggcaggaggtggccggcagagagtctgctcggtgctgaactggacttggctgcctcgctgcattcccgactgcccttgtcaggcccttcccagccacacaaaggtcccaaagatagacgcgttcagcaaaagacttgtgaaaacagctgaaatgcagagtgaaatggcaaaaaaacagaagggggagagggcagctccaaagagcagaataaggggaaagcccaaccaagtcagcaaatatccgggcaaagcagaaacaaagaggaagagggaaatggattctgaggtgaaagtgaaggacaccattagacgctgtacatttgaaaataactaaaagagtataattggattgtttgtgacataaaggaaaaatgccttagggagtggatacctcattctccatgatgtgattattatgcattgcatgtctgcatccaaacatctcatgtgctccataaacacatacaccccctatgtacccacaaaaattaaaaattaaaaaccagtcaatcaattaattcttcctcccctgccgcaaaaagataccattagatggagacacattttaaaagatgtttcccaagtatattttattttttcaaattatatatatgtgtatatatatacatatatacacatatatgtgtatatatacatatatatgtgtatatatacatatatatatatatatatatatttttttttttttttttttttttttttaaagtagaaacagtttcaccatgttggccaggctggtctcgaactcctggcctcaggtgacccacccacctcagcctctcaaagtgctgggattacaggtgtgagccactgcacctggcctaaatttttttttaagtgtttaaaagaatttttaatcagaaaatgcttaaagggtataaagtttttatttatttatttatttatttatttttattttaagatagagttttgctcttgttgttgcccaggctagagtacagtggtgtgatctctgctcactgcaacctccgcctctcaggttcaagcggttctcctgcctcactctgccgaatagctggaattatagtcaggcaccaccatgcctggctaattttgtattttaagtagaggcagggtttcactatgctggccaggctgttttcgaactcctgacctcaggtgatccgcacatcgcagccttccaatatgctgggattacaggcatgagccactgctcctggcctaaagtgtataaagttttaaagcatgatttagacctgtatacaagtataatctcaactatgaaaatatataacatgtaaacagaaaaatttggaataaaatatccaaatctattttaaatgaaagaagtcttaggagacttcttaaagttatatatttcccatgatctcagcttcccttttctttcctttgaaagtagctgactgccgtatgctaacccgctaggctttattttttcatgcatagtcaccaatcttccaggtttcacatatttttgaatacatgcactgcgacacaggaccagagatgtaaagaagggctcagatggtcggcttttttgttgttgttgccgtatgctatatcttgatcagttcttgggaataagcaccaacgtctctattgctcttcagtatggatgacaaaaacctccctcccatcacttttccatccccaattcttgacccatttcacacaaggaatcttatggacacagatagaaaatagaaggaacaaaccatccccatttttgagaatagagtccacagacttcctcgtgggctgtttcttcttcctcctttgtttcctgagaggggtgttctcttctgcagtcagtacacaggcccccgccttcctggcgtgctcgtaaattgtgaaggtctttcttggatctttaaggagttggaagggatctcctctgaggggcagtcccatcttgattggtggtggccccaggagcctccccagcgggctctggtgtggatgcaggtgttatgcgggagacggtcttcccctgcagggctgaggcacatgtctgggtctgagctgaccgagctgctggaccaggtggagggtgccatccgtgacttctcggaggagctggtgcagcagctggcccgccgggacgagctggagtttgagaaggaagtgaagaactcctttatcacggtgcttattgaggttcagaacaagcagaaggagcagcgagaactgatgaaaaagaggcggaaagagaaagggctgagcctgcagagcagccggatagagaagggaaaccagatgcctctcaaggtaggtgaacaaccaggtggaagactgggtgcctccaacctccaaccctgcccgtttcagtgccctaccaaccctgcaggggactcatcaacgtttaccgagcagtggtggtgagcagcacactgtgacagacagggggtcagaaagggagaagatatcacctatctcctccactcccccaaagggctcacagtctaacccaggaagacagtgtgtacattaggaaataattgaatttggcttgtgttctctgtaggcaagaccttaaagaaagtggagtgagggtatttcgtgttgggagtcttgagatgggcctcagaattctgggtccaaatccctccttgtgtcccaggttccagtcctgactggtctctttagggcgtgctaaggtgtttcagtgattgaaaatgatcaggtgccttattattattgttattattttttgagacagagtctcactcttttgcccaggctggagtgcaatggtaccatctcggctcactgcaacctccgcctcctgggctcaagcaattctcctgtctcagcctccctagtagctgggattacaggttcatgccaccactcctggattatttttgtatttttagtagagatggggtttcaccatgttggccaggctggtctcaaactcctgatctcaggtgatttgcccatcttggcctcccaaagtgttgggattacgggcatgagccaccgtgcctggccccagatgccttattgttctattgttctatttttgggtttaacccaaacccctggttctcatggttcattttttttttcttttttttttttttggtgagatggagtctcactctgttgcccaggctggagtgcagtggtgcgatctcggttcactgcaatctctgcttcccgggttcaagcgattctcctgtctcaacctcctgagtcgccgggattacaggttcacaccaccacgcctggctaatttttgtatttttagtagagacggagtttcaccatgttggtcaggctggtctcaaactcctcacctcgtgatctccccgcctcggcctcccaaagtgctgggattacaggtgtgagccactgcgcccagccactcatgcttcttaatcaggggagctcagtagaattatctaaggagtttttttcaaaatgcctttccctaggctctatcacagacctatggaattagttctccgcatgtacattttgaaaaaaacttcccccatcaggacagttgctttaagacagcctcttctgatagctgaacattttgttttcccctaagatctttgcatcatggttcatttaagtttgactgaactgctttatttttctatttgcatgatggaggataaaaggaggaaaactgggggatgcagaggggtcttgtagccctgagggacttactaagataagagttcttgagactctgtttattcttgcaaagctcaggcttcaattctggcctgtctctgtaagccagtgtcttacacttactgtctagtcacagaaccctggggcgttatctgggacagcctggtagctgagaggtccctgggtgtggtgacagtgtagcaagaagcatttgcccttcttgagtctctctcccccacagcgcttcagcatggaaggcatctccaacattctgcagagtggcatccgccagacctttggctcctcaggaactgacaaacaggtacgcgtagtctccctgctccaagctctcttcctagactcctgcagcttggcctccccagcaacgcagggggacagtgactcaccagaattatcccagcatttatttagggggttaggggtcctaacacttttttctcctcttaaggaggaacagagaatatctttttaaaaggcaaactttttttttttttttttttttgagctctagtgttctaggacatgggcaagacttaaaactcaacactgcttgtaggtctaagaattaagttgttttaaggatgaaatgcattaagagggagtccatttgatgatagatcccatcctagagtttagttaactttccaccacactggatcacctgccaagccattcccactaagactgcctctgcagcttcccagctctggttggaacccatgctgtggctttttgttggctcagtaatttccctgtgacatagcttgcatttctggttattaagacagcattcacaacttttatcaagcgcctgctatgtgctaagctctgttgttaagccctcaggtgcaaaggtgaaaagtcctgacccctgtcctcatggagtgtataatctaatagacatggctggcacgtgaacagaaagtttgagatggtggaatgagtgtacatgaaagtgtatatgttttaaacatatttgtagctgaattctaagtgctagaattctagaactctagaattctagagagtctagagaaggggaagagattttagcagcatcgatcccagtcctcttgttttatggcagtgagaactatggcctggagattcaaggcatttttccaaagccacacacactgtcagtggcaaagccaagactaaaatgtgagcttctggccgggcgcggtggctcacgcctgtaatcccagcactttgggaggccgaggtgggcaaatcacccaaagtcaggaattcgagaccagcctggccaacatggtgaaacctcatctctactaaaaatacaaaactagccaggtgtggtggcaggcacctgtaatcccagctacttgggaggctgaggcaggagaatcgcttaaacccgggaggtggaggttgcagtgagccgagatcaagccactgcactccagcttgggtgacagagcgagactctgtctcaaaaaaaaaaaaaaaagtgagcttcttagctttgatctagagctctggcactcaccacctcaggcttccttgagactcctttgacagcccactaggccctgatgctggttttgttgtaggagcacctgacatccagcagagggagcaaatctgacatcagagaccctgggcggggttgaggttctcttgcatatcttttttgacaaaagacaaacaattccttctcaaattgcactgcaaagaataagaaaatataatccccttggatttattctctgctttcagtctaaaggagaaaaagctccccaggattcctaaataacagagaagtttgtagtgtaggaagaatctagaagttgggatggagagaaatgtgggaaagtcttacttttaaagagacattccctaaagaggggtaagaagttctgaaacagtgacgtaccagtgaccatgaatgtttcagagaaggtcagatttgcagtgtgtgtcttagagaaaggctaaatctcaacccagaggaagcatgtcttctgtctcaagccccctgcatgctgtttgtcttgcagtatctgaacacagtcattccttacgagaagaaagcctctcctccctcagtggaagacctgcagatgctgacaaacagtgagttcctcttgttctcagccagatcagtggctcctttttctcccttcctgcctgtacgttgtacctccgtgccgcaggcccgagactcctcaaagcaggtttacatgggccaaaataccctccaaattactgcgtcacatcctcccgcacagtgtaaaattaaaatactctgcagtgataaccagagctgttttttctttctcctggttcccataagggaagaggcctgctgggggaaaaaaaaatgagctggtgaaagaggttggggtgctggtgcaggggactttttgttttcccctgcagttcccaaggcttggcatcctctgcctccctgttctctctctccctgcaacttgaggttgcctggtcggcacttgtgccccttgaagcagggcgcctggtctctgggtctggctgtatttttaatgagaagcaaggtttcttgggtggggtaaggctgactggaaaaaatagagtccagctttccttccaggaagtgactgcctcctctcctccactttgctctattgtcaaatattaataaacattctgaactatgagggaaaacagtgtgtaacaaagagccttttgtagacagtaactgtttatatacatcaaacagtacgacccccaaagggctggggggcacatggtgttagccatcagtgtcagcttggccctcttaggacgagaaaaatcctaggctgagatgtggtgacaggcccagaggatcacgagggaaattccatttccttggcaaccgtgccctgcagagagtgacagctaacgaggccccgcccactgcagcctgttctggagggaaggggccagtgcggggctactggatacccaaggagaggggaagttgagcttctgttcagctgaggaggatggatacctgctggggcctggtgctgaaggtgaccaaacgtttcattttttgtcaatttggagagtgaaagcaggaggttctggcaaacagaaatcctgcctacatcatgcctgcatcaatagacactgtgtccttgagaatcaggaattttaaaatcaaagtacagtgacttgtccttaactcattgtaaactcctttatttgcataaatatgcactaagtttctttttttttaagggagaaaatagagatgaactgacatttatagatgtttgtgttttcacacaagttacatttggaaagtaatttggacaaattatgaaggttgatatatgtaaagtattctatcatagctcaaaaaaataaatagctattaatttgttgcagatacccattcaggaattcagtgtgaaatcttttcattttaattaagaaacagacttttttctattttgagtggttttgtttacattttttaagttcattaaaaaaattatagctagagtatatccatcatttagactactttggaaataaggaaaagcaaacaaagaaaaataaataactcattgtctactccactatggttaccattttggtgcttttcagacttaatattttgtatcttttctatatagttgagattatactggctgtaaaattttgtgtcatgattttagtcacattagttaacactttgttaatgttctttttatggctatctcttctatcatgtggatatactaccttccaacattttattgcttttagaaaaaaaacctgccatcttttctgaataccaattctcctgtaggttatgaagcctctcttttttggcagatcctcatatgaatttgtgaacaatgcctcttctctcttctactctttgaactaagtacataggccaaagaccagctcctgcgactagccaatccttgtaaattttagattttggagattaatttagatacgtattggcaagagcaattattgtatttttacgtgatcttcgtggtgtggcatttagtctgcttatgctcagttgcaaagtgttcttgacaactaagctgaaatgaaggcatgtctaaaaatgcagaaaaaaataaaacaggccgagtatggtggctcacgcctgtaatcccagcactttgggaggccgaggcgggtggatcacctgaggtcaggagtttgagaccagcctggccaacatggtgaaacccccatctctactaaaaatacaaaaaattagccagatgtggtggtgcacgcctgtaatcccagctacttgggaggctgaggcaggagaatcgcttgaacccgggaggcggaggttgcagtgagctgagatcgcaccactgcactccagcctggatgacaagagtgaaactccgtctcaaaaaaaaaaaaaaacccagaagaaaccaggaccccctagaatccacttaagctgagatgaatacatgtctaaagatacagaagaaataaaacagaaacaaaccaacccctcaatggcctcaggttgagtctctttttctggacctggctgctgactcacgccaccattggattttcttcctcactcactcctaattcttggattcaagtttcattaccctgtcttgaaactagtcaaggtaatcaatcaaaggaggacaaggatatcgaaatgaagtggcaatcccactgttgcagctgccttctgaccctagctatcagtgccagttgatctttagtgttttcttggcttacaaaagtaatacatgctcattgagaaaagccagaccccacagaaatgcagcatagaaaagaacatcccctattgtcttacactcagagataactacttaacagtttcatgtattattgttctagattttttttctatgaacattagcatttaattataaagttaataaatgttctgtaacctttcttcactgataactatgtcttgtacatatagctctctcttatttttcttttcttcctcttcttcttttttttttttttttttttttttttatagagacaaagtcttgctatgttgtccaggatggtctttttcttgtttttgagacagagtctcactctgttgcccaggttggagtgcagtggcatgatcacaggtcactttgggaggccaagtggggaagattgcttgagcccaggagttcaagaccagcctgggcaacatggcaaaacctcatctttactaaaaaaaaaaaaaaaattagctgggcatagtggcacgtgcctgtaagtctcagctacttgggaggctgagagggggaggattacttgaacccaggagtttgaggctgtagtgagctgagaacacgccactgcacttcagcctgtgtggcagggcgagatcctgtctcaaaaataaaaaagaaaagaaagtcaccagtaggtccactacctagagacaaacactgtggctcttgctgtgttctcgtctatcaccatgtgcaggtttgttacgggggcatattgcgtgatgcctctcaagtactttggactacaggcgtgtgccaccacacccagctatcttttttttttttaattagaaatgaggttctgccatattgcccaggctggtcttgaatgcctgggctcaaggtctgggttacaactgaaactaaacctgtcacccaggtagtgaacatagtaccggataggtagttttttagcccttgcccctgaaatgctgacccctgatagagccttctagacttttgctcaatactcaataaatgtctggttcttttgaatcatttctctctcactctgggctggtgggtcatgtggccctagaagtgaacctctgaccagatggtatcttagttcctctctctgtctcctttcctagttctctttgccatgaaggaggataatgagaaggtgcctactttgctaacggactacattttaaaaggtaagagcagccccaggcctcctggagcagaaggggttctctggagctcctgctccagttagggaaccttcccagcttgcccatgccagaccagaccaggcaggggccagggaaatcagggacaattgaaaggctttggagtaataggttttccctttgggtgttgccaggaggccgcaggaggagattccatcacccccgagtcaccagtgactttccttggagcaacaaaccaacaaaggacttattgtgaaaattctgcagagtttgggctacttagtatttagttgggaaaaacaaaacctgatgataatttaatacttttcaagcacttgaaaggaagctggagacataattgactacaccctttcataactttttaaccttgtcttatggaaactggttgtacatacaagagtagaggaaatggcataatacactctcaggtactgatgagctggcatcaacagttattaagtcccggccaggcttatttcatttacgcctctacccaacttctcccctcccatgttattttaaagcaaatctctgtcatagttttcatgcataactatttcggtatgcatttctaaaacataggaactcttgaggaaaacatagccataataccatttcacaactaaaacaaatgaagagtttctttctttttttttttttttgagatggaatctcgctctgtcacccagtctggagtgcaatggcgtgatctcagctcactacaacctccgcctcctggattcaagcaattctcctgcctcagcctcctaagtagctgggattacaggcgcctgccaccatgctcaactaatttttgtatttttagtagagacggggtttcaccatgttggccagggtggtctcaaactcctgacttcaggtgatccactcgccttggcctcccaaagtgctgggattacaggaatgagccactgtgcccagccaagagtttcttagtactgactatccaatcagtattccctgtttttcccataaagtatttttcagtttatttgtttgaatcaggggccaataaagatcagtaggttgcaattagataataatatgtctcttacatctctttgatgtatataggttccccttttctttctctcttccatttcttgaaatgcatttgttggagaaactaggttgtttgtgccatagaatttcctcattgtggatttttgctaatttcatccccatggtgtaatttaatatgttctcctgtcttctttattgcctgtgaactgatagaactggaagcctgatcagatacagcttccgattttttgataagcactacattataggtggttataggtttccagacttccatggggtgacatatattgtctgattgtctttccttttgtgatgttaatagtccttgaggattgctcactgtctagatctattattttattgttttttgtcctgcatgcacacaaaactatgtacggttgcagagggaccatatttgtgggacctatagctaagaaatcctgagatatattgtttctataaggatcagaaggactaatcttaaatttcagcaggaggaacttagagtaaacattaaaaataacttgtccagcctgggcaacatggtgagaccgcgtctcaattaaaaaaaaaatcagccaggtgtagtggtgcgcgcctgtagtcccaactactcaggaggctgaggtgagaggatcacttgaacccaggagctgagactgcagtgggggctgtgatcacaccactgcatccagcctgggtgacacagcaagaccctgtctcaaaaaaacaaacaaacaaaccacaaaacaaaacaacaacaacaacaacaacaaaacacaaaaaaccacagaaagggtttgtgactcaaagattttaaaagagcagcacatttctcaaaggaggttctcaaaggaggattatagaaacaggttatataaatttggtagtcggagggctggactttacccctcacgagccactgagttgtcactgaatttgtacaagtgattaatatttactcagcacttgccacatgcctctcaacaaccctgcggggtaggcgcaggtacgttctattgtattgatgaagaaacaagcatggaaaggtgaagttaatttccctaaggtcatgtagttagtaatggctggatccaggatttgaactcaggccccggagactacacgcttagttattataaccagcaaccacctgccattgtctctcccttattctaggcactaagtgggggctgtcaccactcaggagctggtgtgactgctctcagctagggctatccagggctcggaggtccccacctgcaactgtgttctgaccgctctcccctcctctcttctcgttgcagtgctctgccctacctaaccttgccctttggagcagcctcgctgcaggaggtcactgagcaagagtcattccatcacagggactgcatgagaccatgtaacctccgacatgtatttaaacgtgtatagcttaacctggattaaacacgagcaagcgcgcggggtcctttgccgttggcttctagtgctagtaatcattggatgcatgatggggcagggccggtgatggtgcctcccccttgctggtgtcaggagaggggaaggcagccgctttcaccgctcattatgtagtctggctacagccctcaaaaacagcttatactcttaagactaattttgaaataaaaccttcatttaattaa

SEQ ID NO: 29 - DNA, 89200 bp, Homo sapiens
ggggcagctgggccgggggcgggggtcggctgcagatctcccgttgtgtgagagaaacgcaagcacggagctcccttgacctgctgcatcctcctcggcaattttttttttttaagtcaaaaagcttggatttcctgaaattgttgaactggatgtaagtgcagggcccccctctccgctctccccagcagggtgagagttgctgaaggggaggaggagtgagatggggtgaagtgagttgggggacattggagagacactaaagctaggtgcccgggacaggaaaagtgggaggagaaggaggaagaggggaggagggggagaagggggaggaggaggaagaggaggaggaggaggaggaggaggaggaggcggccgtaagatgagagaggagggaaacgtgtcaccagcccggctgtgggagctccgcggccgaagcgtttgttgactcgcgctggagaggaaccgaggctggacgggaccccatctgagggcagagctgggggaggagggagggacggagggagggagagctgggcagagcgcgacggggagaaccatccaggtcgctcatttctctccggtgagaaaacttcctcgggaagaccggaaactttttcctaggcgcgcggagtctggggcggaggcgagcggcgggtgtgcgcgactcggggtgattcacgccggggaccccaaggaggtgagtggtgggtggggggcgtctctgggaggggccggagtcataggctcagcaaccgcgcaggattgagcgaaaattaccgcgcgctaatctgacggggcgcggcgtggcgggggtaggagctagggaaaagtgtcacgtttgggggggcaaccaggtgggaactcctgcatggttaaggatcctccgatcggacgctgcaggcaggcgtaggggatcttactcgagaccaccatggtggggaggtgggcaggccacgctcccggtctgctctttagggtggttgaagtaccgccgtgaggtgggatgcggatgctggtgatcatgggacctaggctgagccgggaggtcgaaaaagaaagtcggcttgtttgactctctcgttctccctctggggggcaaatctaaagagctgaccccgcttaagcacgggagatttcgcgcctgcagcagccttttcccggcggtccccctttttctggagggaggcgtgggagagaagggcagggcagggagccactttgtcccgtgcgctgctgcacgcgcgcgctctgcggactagggtgggccagggcccagccagtggggatcccgccgggacgggctgtgagcaagccctgggacggcccggctgcggaccccgcgctgggagtccgcagtatcccccttccgttttatttctcccgcctgccttcctttcggcgaggctttcctctgcgcgcttactgtgcgcgcatgccgggctcgctgcacgcagggggcgctctaggggccccgcccgggcagctgggaccctgcctgcccaaccctccggcccattttccttgaggccgccgcccggggtgggaccaggctgtgtgcttgctaactgtgcttcaggaatccgctctgggatgccttcctgtctggcaaaaggggttacccccagttctacccagtccctgtcctcggtcacatgctgccgccgcctcttcccccgcggtgccgggagcccgcgttttgtttgtcagcagttaggcggtgagtatttatagacgccacggcagtcctgcggtgcgcaaggtttcaattactgcgatgcgccccacaagacgaaaggttcacgcgctgcgtctgagctgcacgtctgccccggagacccgcgtggaaaaagctctgggctggaatctccgggcttccctgcttgggcagaattctggacctgttgcccagacgacacgtgcacattcagatgacccatgctaaggaccaaagggatgccaccggcccaatgtactgccttcatcccccaccatcctcaagggacccttgctgatcaagcccgggagactaccctttttgacctctctttggtgatcctgaccaccgtagaaatttgcagtcatgacatttcattgccctacatactgcaaaatgtcaaagtgctgagctgtggtaaattgctctggggtggaaggcgctgttactgacaacacgaagcagctagcgggtcaggaggggaaatggagcttgcagaaactaatttagccacatttaaaatttagcccctggtaaggttcccagtatgactgacgaaggtgcagggctcctgtctgtggaacctggctggttagtcttctctggttgcagccctagaatcaggatcaagggtgctgtttagagcggtttctgtagcatgtagcctttcagataagggaagtgatgcttggtcaatccacaaagttgtcttcagtttttccaactgcaaccattgttctttgagtatgttactgatgcttctaacaactggaaccactaatatgtaaaagaagaaaggcactagaaataagaaagtctaactagcttatttctcaaaggcttagtttagactactttgtttctcaagggtgggacctcatttctttcaggtccagagggccatggatatatatttatttctgtgggtgaaatttcaataatgttctgtcttagaacattacaaatatgtgccacttgttttaaaaaggggaaaggtgcaaatgcctcttgaggtcttaatgatgtcttaaactttgcactgagagactttgataatattatatactcctcatgcaaacaatgatataggtactattatatccctatcatatagatgagcccactgaggcttggagaatttaagtaatttgtctaaagccatacacacagggatggagctgagaatggattacagatttgttactccagactcatagtctggacatgtctttcccttcaattctccattgttgattagctcacgttatagttgattagatggatggctttttatttattttcaaaatttcacagaatgttacaaattggctcagttattggggaaaaaagccctaatcttgtctttagaaaactgttatattggttatctgaaaatctcttgctgatagtccagacctaaatcataatcctcactttgctccttgacttaatgtatcttcagcattaaagccatttatctgtagaaaattgaattcagtaaggactttgtggattacttaattttttcagatttctccatactaatgatttgtaggtatgcatgtgtctgttttcctgtggctgttccttttgtacaaggtaaaatatgctgaaatctctcttaaattgcagcctttttccttttcattctttttgcagagctagacccaatacagaattgatttgaaaaacagtgtgtgagttcctctgaaagatccttacaatgtctaatgttcatcattaaaggtttgttctcaagagttgcctctctgtatgtaaaatgtaaatacatgttaaaggcaatgcttgtagaaatgaccctttgttaacaagtcagtgtgaattaatattttagttgctgaaatataggaataaaatattttgtggattttgtacagaatattatggggtttggaattggggaacaaagagagcggtaccctgataagcagaaagcactgttttacaagagaagatttcacatggagccaaggagggggatggatggcagtgatggggcatcagaggtgaatttgagttaattcacatttttgtcagtacctggggatccaagatttactttgaaacttgtacagttaaaacaaatgagctgacttatttattgggcaacttctgtgagtcaggtatagctatggtaatggtatttgcgcctcccaacaactcaggtaggaaggtattattttctctattttcagatgagaaaacagaggctcagagagggttgttaatttcccagtgtcacacagccatgaactcaagcgtcttgctcttttcagtacattttgatatctacccttgaaggccttccatggagaacccagggtcccaagttctcaagaaaatcctagtggttcacatggaagtttctggatcagaagtcaaggccagagctattcagggactctaaaatgaggagacaggaggtgggtgaacaatgaagcctgaagggatagtctggataattctgacagtagtgatgccacagaagaaggaaagtcaggcgctgtggatattgtgaatatagagaattactagcattggcctgggcgaggatggctgtcgcattgcagaacacactagatgaggttcccagaagggaagagtggtgaagtgtctccacctccctcccgatgccttctgctgcccggtgttggctttatagtcaatataaattagggagcctgtgggacctgtttgcattttaattagacttggccctttgaggttccagtcactcagtctccctctttaaatattctttttttatgctttgccagtttatggcctttgtagattaatcctcggatttcatgtacgggagagagaaagagagaaaaaaagcaaaggttagtgattacctaaattggattaagttctgtctagcagcatttaaagaaatgcctcttgctccctaattaccatcaactaagaatttaaacggtctattaaatttaagctgacttttttaaaaaactccctgaaatttccagctgtaacatattctgagattttagaggtttttatatattcttcaaatgtgtagaggacattctctgctttcccccccttttaaaaaatattgcatttctggagcaggataataaatgacatcactatatactaacttcgttaaaaagcagaagctcacagctaggctcagctagaagggtttgtggagagcagtagaaatccatctgaccgtggcctacgggaagaccttgtaaacatctaccccctccaaacaacctgtcattaattatttgttcaatttatttagcatagaattatatgttacataaaattatgtatttactcgtgtattaaacttgcaaagctttcattcttctttttctcccctcaattttgaggtgcgaatatgtttccctcacccacacatcaatattctggtttcactttagctggttaccaaatgccggcaacacttccactttaccgttctctccttacattacctattacagaactttctccaactttgctggttctttttgacacaggatgtgtcctgtattttgttgatggcatctttggcagcagttgggtttccagcaaatactaggattaagggactgcaatggactcagctgtttaggaactggagtatatgttagcttaagttgagcctggaagaatagctgaaaggatttgtttttatctttttcccaaggacagggggcagggtaggggtgggtggggagggggagaaaaatctaccattggctctgatgtgtgtctgtatcagacttaactaagctgcctcaaaccctgtcacaacctgcttgtgacctcagccacataaatccttggtgtaaacccttttatgctgccatttaattctaaatacttctctggaactggctcaatatcattccccagatgtctttgaggagaccacatcgactgctgccatcattttggagaactgtttcatcatgctagctcccggacaccaccactatggaagcagtatggccactttccttgtaaaacatctcgcaggctgaattcttgggtaaacatggtactcttttgtggtgtttgggataatttttttttaaattattcaccaacaggacaatagattcctttcaggcctcaaaaaagctccccaccagccgggcgcggtggctcacatctgtaatcccagcactttgggaggccgaggcgggtggatcatgaggtcaggagatcgagaccatcctgaccagcatggtgaaaccccatctctactaaaaatacaaaaaatgagccgggcatggtggcgtgtgcctgtagtcccagctactcgggaggctgaggcaggagaattgcttgaagccgggaggcagaggctgcagtgagcggagatcgcgccacttcactccagcctgggtgacagagtgagactccgtctcaaacaaaagaaaacctccccaccaaggttggtatcaacttttcagagaggcagggttgttgaatgagccctcattttggtcctaacgggcatcatggagataacacaggttgaggaattgagatctggaatctgatctcagctctgccataagcaagctgtatgaccatggtgagttgctcagttattctgggcctcagtttccctatttacaaagtaatgactttggcctaccactaagcttccattctgttctaaaattccttgatggccaaggaagcatggtctagagctgtgcttctgaaagcgcacatgcatcacctggagatcctgttaaaccacagaatccgattcagtaggtctgggctggtgccagaatgtctaagaagctcccaggcaatgttgattctgttgattcccagactacaatgcgggtagcagggcactagagccttggtcagggcttccccaccttggccctattgatggttttggcggataattctttgtggtgggggctgtcctgtgcatagtaggatttttggcagcatccttggcctctacccattagatgcccatggcatcctccactctcatagttatgactatcaaaaagtgtctccaggcagtgggacaaaatcgcccctagttgaggacattggtctagaccagtgttatcaagcctagttgtacatcagaatcacttggaagatatctgggaagtacaaatttaggtatcttgggcccagtgaatgaaaatgactaggggagggcccaggaatctatattccttaaaaataaggtgatagagatggcctggaattcttctctttgacagtctgaaaaagtacaagatctacacctgagttctggtgttatccctccatagctatgggaccacacaggcaagttgcttaaatgctctgaaccagaaactctccacttctaaaataggaataataatagtgtctacctcctaggattgttgggggccaagtgggataacatgaggaagagccttaggaactataaagtgctgtgcagatgttagtggcaaatgttataccacaggcctctggagtttaatttttttggttcaattactttatttatttttcccagggctgtatttctttttcttgaggcttagctctgtaaccttcacaatatctcttttctttggccctcacagtcaacagctgtgtacatttgtccccactcagtcccatgccagtctcaaactggcagcccgtgggccaaactttggcatcagacatgtactgtttggcttgcattgtattttggggaaaagaagaaaacaagatgattttctccagtatttaaaagttgggagagttgacatctgaacacaggttttcagcttttctgtaataaaccaaaaggagtctgaggacactctttagtttgccacattccccacctgacccgctaatcttgttcacgttctctgcttcggtctgctgtaagcattgtttcccatcccagcattaggctttcctgtctttttctttcttttccttttttttttttttttttgagatggagtctcgctctgtcacccaggctggagtgcaatggtgtgatcacggatcactgcaatcactgcctcccgggttcaagtgattctcctgcctcagcctccccagtagctggaattacaggcgcctgccaccacgcccagctaatttttgtatctttagtagagatgaggtttcaccaggttggccaggctggtctcaaactcctgacctcaggtgatctgcccgcctcggcctcccctgtctttttctttaatcatgaccaattactattcccttttattattatattattgtaggagccatatctggctcatctttgtggcaagagtagtaggtactccctagatatttgttgaaatgtgatattttcatcctacacctggtctttcatagttaacaccttggatacaccttgaacttttaaagcttcttgcctatgaaaacttgttcttccttctcaaaatttcctttccagtctccaggccccatattctttagtgttatgggcaaggaagtagagaacctgtagttttcagttgacctttcattagctttgcttcgtaactccagaatgtgagttaacctttctgcctcaatcttgtctcagttgtccatcttcaattacagcccttggtgtctgcatttatagtattacttttggatatttccttagaaaccctgagctccctgggagaagatgatttattcttctttgccccctgtaacttcctttactcagatcctggcatccagtggacactctaatgtttggttgagttaaatggacttgaattggaatcattacctccatgaaatgatcatatgtggatatttccatcagttttctgagcctctattcaatgcctgttatacctggctatactacctgagaagaaatttcccttcccttcatctctttttctcctcttttctttttctctcttctttctttctttctttctttcttttttggagatagtgtctcactttgtcacacagactggagtgcagtggcatgattgtagctcactgcagccttgaactcctgggctcaagggatcctcctgcctcagcctcctgagtaggtaggactacaggcatgtaccaccatgcctggctttttttttttttttttagagttgggatctggctagattgcccaggctggtctcaaactcctggcctaaagggattctcccactttggcctcctaaattgctgggattataggcatgaggcactgcacccagccttatctccttttcttatgaaaaaaccattttatcttatttctgccatgagagagtagagctaattttttaaagtaagttgcacattttaatctagagcacattttcccacacttaaaactcttgttggctgccagactgtagcttttgactactctttcactcaccagggttttgtatacgttacatgtcagaaatgtaattgctcactcacataatggtcagtcttagctactgtttgtgtctagactttttggcttaccatctggtaggcgctgcagaatcactctggatgacatttgggggccacacccagacaatatgcactccaagaaacttgatacttaaagtaggcttatagatgagtaaataagatgtgtggttatttcccacagctttgtttaacttgtatcacagaaggggatttttctggtgattatacagtggcttgcaggccaaggtgatgatgatgtgatgatataattacttctaggtgcatctaaattgtcagctttctgaatcctgtggacacttagtgaacaccgttaagcagagataaacacttgagcgtgtatcctgtttgccctaatatttattgttgtgcaaatttggactctcagactcttctctctgcactcggtttccagtagcgcctgagaaagttgtctcttgcttcctgttgagccctttccatagttcacagttgacccttaacattttcttgtctgtgagagtcagtgttcattctttggccggcttttgtctcctaagagttgcaaagattggtccttaatagaaacaattgtgctatgctatgtagcaggcacttctgctctgctatgtctgtaggctccactgaccagcaaacagactcaggattgctcacccatgtggtccaggtctacgtccccgtggacaataatgcttaggtggacccaagtttagtcagcagcaaagaaaattattctgatctctcagaaatgggaaggctactcttcctggtggcttggaagtgcacctttcattccatcatttaaaaatatttgggcaggcatggtggctcacacctgtaatcccaatattttgagaggccgcaatggaaggatcacttgaggccaggagttcaagactagtctgggcaacacagcaagacctgtctctacaaaaaattagctgagtgtggtggtacacacctgtagtcctagctactcaggaggctgaggtgggaggattgcttgagccaggaggtcaaggctgcagtgggctgtgattgtgccaccatactccagcctgggtgacagagcgagaccttgtcttagaaaaaaaaagtaaaactaattaaaaatacgttaaaaataaataaaataaaaatatttattgggtaccttttatgtgctcagtactatgctaggcaccaggatacaatagtgaacaagacgggcaagatttttgcctttaaggagcttccattctgtcagggctcatcagacactgaacaagtaaacaaacacaacaactgcagcctggtctgtgggtgccactaggaaacagagactccttgcttgaggggcagagtcctcttgctctaaggtaagaagctatgggtgatgtttatgcagggaagaaatgggtggcgtttaatctctcggctctgtgtgtggcacacacttgcattgtttaagacaggggtcaggagttcaggctctggaatcacacaggatttgcctcttggttcctcttcctagtcttctgcctttgggcaagtgaatccctatgcttcggtttcttcatctgcaaaatgagcctaatgaaacctacctccttggtttagagtagaaattaactgagggaatagatgcaaatggaggcttgacacagtcctgaccatcatggccagcctctgatgatagttaatattattctaatcagcagtcataatggtaataaaatagtcatggttgacaattgatttgaccaaatggccccaccacttttgaaaatctgcttgtgacctggtttccatccaatgggctggcgcaggggcaggcgtggggtccagatctagtctcctatgctggcttggagggttctgccttctgtgtgtttcctttagcagtaccttgggtgctgctggcttaccctgtatctgggtgtgtatataatacataggggagtatgtcatacataagacttcatagagaaatcggtgatgggctgcatgttctcattcataggtgggaattgaacaatgagaacacttggacacagggtggggaacaccacacaccggggcctgtcgtggagtgtggggaggaggaaggatagcattaggagatgtacctaatgtaaacgatgagttaatgggtgtagcacaccaacatggcacatgtatacatatgtaacaaacctgcacgttgtgcacatgtaccctagaacttaaagtataaaaaaaaagaaatcggtgatgggctgacagtgagataagacagctgccaagttaagaggctggtgaattagatgatgtggtaggtgggagttcaaacatggctgagggatggttctgagtttgtattgtgttagggtatcagcccctgcctcctctctcaaaggttctcagtgtgtatggctcccagggtaggggctgaatgcacagccagagatggtgaaagatcatcgtggccatcagctgggccaaaccattaattgaatggtgagtcagcagacccagagaagtgaagtgacttgcccaaggccacagggactgattagtgcaggcttaccttatacctggcttaggctccacataaaaggtctgagaaggctggaggctgtagctgtgatggggtagaataaaggtcacaaacctacatgtttggccttcaaagtgctggttggcctggtgaattagttgccaacacttacaaatccagtgatttcacatttctaaaaatttggatttttggactttcttgggaaaaatcagatctggcaaaaccaggcttatatcctaagatggcaaacaccagatcggattgagtaatggctgcctcctttagccagggcaggtgctggtagtaaagcaagcttactgtccacacctgcctcactccctaaactggtcccagcctggccctttcggcccatttatgatgcatagcgcagaaaaaagaaaagaaattggttcttcctttcatctacttttcctgccagtgtttatttgctagcccatatgttcctgcacagggtcactcctattgtgaaataaatgctgaataaataaaattggtgtcaaatgaatgaactgtcattgctagagcccaacttgggatcagaagctgaatcctgacttcctcctaacagctgggtgactttgaagaaatcatatgacctttatttgttgtcttccttttggggaaaggaggttaggggagtcactattgcctttacatttatttatttgaagaagtaaggcattttcatgtttctgaattcaaaaagtccaaaagggcttatagagaaaagacttccctactgtgtcgctgctacccagctccttgccctaggggaaaccagtgttatctgttgctggtttgcccttccagagacattttacgcacatgcagtgaaaagggtaaatgctctttttaatcctttttacatagatggtagcataatgtacacgtggctctgtgtttagcctttctttcattcaaggtcggctctttctttcttttttttttttttttttgagacggagtctcgctctgtcgcccaggctggaatgcagtggcgcgatctcggctcactgcaagctccgcctcccggattcacgccattctcctgcctcagcctccggagtagctgggactacaggcgcccgccaccaagcccggctgatttttttgtatttttagtagagacggggtttcaccgtgttagctaggatggtctggatctcctgacctcgtgatctgcctgcctcggcctcccaaagtgctgggattacaggcgtaagccaccacgatcggctcaaggtcggctctttcttagagctgcatcaccttccagtatatgggacaccatagtttacatatggccagttccctgttggtgagcacttatttccagctcattgttgttataaagaaggctgcagtaaaaacccatgttacataagccacttgacgtgccttgaataaaattcttggaaatacatttgttggtcagagggtatggcctttgtcacttcggtagatcttgtcacatttccttccacagcagtcaattcagactgctctccctccagccatgcgttcaagtgcctgtctccctcaaccccaccacccatcaccttgcaaagcctaagagggttttgtgaagaacacaatgttgtataaaaatattaatactaactatagctttttgcgcccctactcagggcgaggccgtgatctaggttatctcattttcatcttaacaacgtgcacataagcattacaaccatttgacagacaaggacactgaaattcagagcctatgaggaacatacgcaggtcatccagctaataagctgtagaggctggatttgaagccaagttagtcagatttcagtaccatggtgtttacccatggtgaagccccatgtatttttttttttttttttggtagagttttgctcttgtcacccaggctggagtgcaatggcacgacctcggctcactgcaacctccgccttctgggttcaagcaattctcctgcctcagccccctgagtagctgggattacaggcgcccgccaccatacctggctagttttgtatttttggtagagacgggggtttcgccatgttggccaggctggtctcgaactcctgagctcaggtgatccacccgccttggcctcccaaaatgcccatgtaattttaaatgttgatgttctgagccgacacctgcttatggttcctgtctctcagcaatgatgcctcacacacagctggctcatttactcattcagagaatatctgtggaattcctgcttcactaggccctgtgctaagccctggggatgtacctgagaacatgacagacagtgcctgcccttatgggcctcacaaacctataacaaataattctgtagtcatttattaaggcagattatgacaagacgacaaaggaggtggggagggtgctctctggggtggtggaacctaatcaggggtgaggagaaaggagggtgtctctgagcaagtgaaggtgggctataaagggggtgcaggtttgaacctggagagttgggtgggaaatatttcacatagaggccacagcacatggaagggtcctgaggtggggcagagcaggtgctggtggaagacatgaaggcaggccaatgagcagacttcagagtggtgagaagtgagcctgtgaggatggagtttgtgaatttattctaagacttgtggggaacagttgaaggcatcgcagcaaagagtgacataagcgttgtgggctatggactgttgggttctagttccagcatcgtttctcatgagatgtgttacctgagacaagttaaacactctgtacctccatttgcctttctgtaagctggggctggtaatagcacctgccttctggtggttgtaagatcagacacaggtgcttccaaacaggtgctttcatgtagttttgagtgccatatgaggtatgaaataaatgaggcattttaacccagtaatcatgaataaatttattttctccaaatgtgatgcactccgatattttctattccatttcactaaaagtcaagaccctctaagttcatttttaaaatgctgagataatacatgtcaagtgcccgcctcacagttggcagtcagtaaatggtgctatcatgatcatcaaggttgtcattagaaagaccattctgactgcaattagagaatggatcagttgagtttgaccgatcattatctaaatcctggtggtgtggaaggacattgggtcattcctgtgttcatggtccagggaaggatttgcacgctgggctttctgactgcagaagcttccgagggttgtgtgtaaaagaggccatctctcttgtttccgtggtaactagtttctccttgttttccaggcaggcacatcagatggcatggctgttttctttgacttctttgttacttacactcagaatggctttttcctggaagcctcagagttattataagccacccacttctttattttaagttgttgggccatgattctacttcccttttcagagtcaaaggttggagccctagtggaattcatttgcattttccactaagtgcagcatcttcctctacccactgccccagcaggcagggctgtgccccatctccatgccctggcgtggcagctgtgaggagaaagtgagatgacacattctttttctcctagaaacacatcttggaagtttttgatgaaactcatataagctgagtgttagcaaggcctgtgatacctcccagtaaccctgtaactgccaccgaatttcccggacccagggcctgggctttccagataactgaagttaaccctttcagcaccaaaacttttaagttgcttttgaaggggatttttcttaatgtaaatggcattggtccttccgaaagaaatatggaccaaaattctagtttctctaacttggagacattgggcatagaatatttcttttaatttttaatttttgtgggtacttagtgtgtatatttatggggtacatgagatattttggtacaggcatgcaatgcataataatcacatcagggtaaatggggtatccatcacttcaagcatttctcctttctttgtgttacaaacattccaattatattcttagttattttaaaatatagttgactgtagtcaccctattgtgctatcacgtacaagatcttgttcattttacctaactatatttttttacccatttaacatccccccttcctcccaccacaactaccccttccaagtctctagtaaccatcattttcctgtctccgtgagttcaatcattttaatttttagctaccacaaataaatgagaacatgtgaagtctgttgttctgtggctggcttatttcacttaacataatgatatccagttccacccatgttgttgcaaatgacaggatctcattcttttttatggatgaagagtactccattatgtacatgtaccacattttcttcatccattcgtctgttgatggacacttagattgcatacagattttggctattttgaatagtgctgcaataaacatgggagtgcagatatctcctttgtattctgatttcctttcttttgggtatatactcagcagtgagattgctgaatcatatggtagccctattttttgttttttgaggtacctccaaactgttctctatagtggttgcactaatttacattcccaccaacagtatatgaaggttcccttttcttcacatcctcaccggcatttgctattgcctgtcttttgcataaaagccattttaattagggggagataatatctcattgtagttttgatttgcatttctctgatgatcaatgatgtattagtccattttcacactgctgtaaagaactacctgagactgggtaatttataaagcagagttttaattgactcacagttccgcatggctagggaggcctcaggaaacttacaatcatgggggaaggcaaagggaaagcatagtgacaggagagagagacagagagcaaggctggaactgccacacactttaaaaccatcagatctcatgagaactcactcactttcatgagaacagcatggaggaaactgcctccatgatccaatcacctcctaccaggtccctctcctgacacatggggattataattcaacatgagatttgggtggggacacagagccaaaccacatcaaatgatgttgcacatcttttcatatacctgtttgccatttgtaggtcttcttttgagaaatgtctattcaggtattttggccattttaaaatcagattattatatttctttcctatagagttgtttgagcttcttatatgttctggttgttaatcccttgtcagaaggatagtttgcaaatattttctcccattctgtgggttgtctcttcaccttgttgattggtatcttttgctgggcagaagctttttagctcaatgtgatctcatttgtccatttttgctttggtttcctgtgcttgtggggtattactcaagaaatctttgcccagtccaatgtcctggagagtttccctaatgctttcttttagtagtttcatagtataaggtcttaggtttaagtctttaacctattttggtttgatttttatatataagataggggtctagtttcattcttctgcatatgaatatccagttttcccagcaccatttattaaagagactgtcctttcctcagtgtatgttcttggcacctttgtcaaaaattagttcactctaaatgtatggatttgtttctaggttctctattctgctccactaatctgtgtgtctgttttttatgccagtactatgctgttttggttactacagctctgtagtataatttgaagtcaggtaatgtgattcctccagttttgttctttttgctctggagactttggcaattctgggtctttcatggtttcatataaattttaggatgttttttctatttctgtgaagaatgtcattagtattttgattggaattgcattcaatctgtagactgctttagatagtatggacattttaacaatatcgattctttcaatcagtgaacatggaatgtctttccatttttgtgtgtgtgtcctagaagaggcaattcggacataaagagaaacatcaagggcatgagtgcacagaggaaagaccatgtgacggcatggctacaaggcagccatctgtaaaccaaggagagagaccccaaaggaaatcaaccctgctgacaccttgatcgtggacttctagcctccagaactgtaagaaaacaaatttctgttgtgtaagccatgcagcctgctgtattttgtaatagcagtttgaacgggctaatacaggggtagtactaatggaggcaataaaagaaaccataggtagcatttatcaagcacttgctgtgttcaaggagtattctaagccctacttgagtcatctcatccaatatcttgcaaatcctaaatcacctgctcaatgccccacaggaagtggtgacaccagcctgactcgggtgccttttctctcagcctccactgcacctgtgtctagcacctatacagttccaggaaccatgcaaagtacttcatagacaatctttctggtcatcacagctctccaaggtaactcttcctattctcacttttcagatgtagaaactgcagctcagagatgtccaaggtcacactgtgagtttattggtttcttgtggctgctataacaaatgaccacagccttcatggcttcaaacaacagaaatttattctttcatggttctggaggccataagtgcagaattaaggtggggcagggctgtattccctctaggggggaatctgcttcttttctctttcagctcctggtggctgcattactccagttcctgcgtctgtctccatatcaccttcttctctatgcgtgtctgtgtcttctcctcttctgtctctagtaacttctgcatcccctttataaggacacatgtgattgcgtttatggcccacctggataatctgggaccagcttctcttctcaaaattcttatctgaattgcatcttttgccatataagataatattcacaggttttggtgacaagtgtatgcatctttgtggggggtggggagatgtttttctgcctaccacagtgagtgaatggcaaagtgaccactgattttagggtttatctgcccccagagctctgagtgatacacatttgtggctgtacatccttcagagctataagcattatacttctcaacatcttttctgcaatgctatttctaggctctggtgggggtgggtattggagtcataactaagaatttctggaccctttgattcagaagttccattgctgagaaggcaccttacaaacatggtcatgtcatcccgaagacccacagattcgctcattctttacagtaaccacaaaaggggaaactccctaaatatctacccataggggactggttaaataaaatgtaatatctcctaaatggaatagtcaagctaccattaaacataataaagtagatcaatatgtagtgatatgggaagatggccatgacgtgttattagaaggaaagaaaaacattactcattcttaggatattaataagaatgtgtgtgtacacatgtgtgcagctattaacaattaaataaaattaaaattcagttcctcagttgcactagccacatttcaagttctcaatagccatatatggctagtggctaccatattggacagcacaaatacggaacatttctgtcatcttgaagttctacaggatagagctgctctatgctaagtggctagaaagaggcctttcactatgtttgttatagagttatgtgaatgcttatgtttgttataataaatgaccaagtatgctattatcagaaaaataggggcacatagagtttccaaggtaacattctatttcttaagtaggtactagttcatcattatttatttattagttattttttttaatagaaacagggttttgcttcgttgcctagggtggagtgcagtgacatgatcacagctcactgtaaccttgaactcctgggcccaagcgatcatcctgccttagcctcctcagtagctaagaatatgggcaaacactaccatgcctgaataatttatttttatttttattttttgtagagacagggtctcactacatttcccaggctggtctcaacctcctgggctcaagcagtccgcccgcctcagcctcccaaagtgctgggattataggcgtgggccactatgcctggcctattattattatttaaaatgtatgtttgcgtgtgtataaacttttaaagtatgtttcataatgaaaatattttgaaatatataggaaaaaagaaaaaaggaatctcctggcaggctcaacagtgagccaggcgtgagtctgggacacttccggccggggctgaagccctgacctgacagctttccaagcttggccaagtcaggcgcctgctcaggcctcagtttcctaatttgtgacagactgtctgctccatctgccttacaggactgaggtaagacttagaagcacaccatgtgtagaaaaacactttcaaactgaggaacttgctacacagagatgtagggtcagtaaataaggtcatgagttattaaagggctaaggaggcaagcctgggtgcactgtgatggggatggcggctcagaggacttgtctgctcctcagtggagtatttccagacgctactgcgtcaccagaagcagagggagctgctgttgtattcccactgctatcatggcttggcaatttagaaataactacgacaacatgattttatttattgaacgagctcttatgtagcacttatttgccaggtacagttctaagtgcttgacaaatatttatccatttaatcctcctccaaccctcaggtagtcactcagggtcatttcatgtgggaggaatttgagactcagagaggtcaagtaacttgatcaaggtcacacagctcatagggagtgggtgtctaaggcagctgttctttctcctttcatcctttctcaccactcctcttgccccatcaaatatggtcatagagttccttatgccagcttatttatctcaggggcatgagattgaacttttgataggaaatttagttcctaacttagtggcttcaattctagttttctggctgagtttggtagcatggaaaagtgggaatgggctggagaatgaggcaccagtcaatgatctgccacacactagctgtgtgactttgggtaggttacctaacttctctgatgttcaagttttcttttcttttttttttttttttttgagatggagtcttgctctgttgcccaggctggagtgcagtggcacgatcttggctcactgcaacccctgcctcctgggttcaagcgattctcctgtctcagcctcctgagtagctaggattacaggcacgccaacacgcccagctaatttttgtatttttagtcgagacagggtttcaccgtgttggtcagtctgatttcgaactcctgccctcgagatctacccatcttggcctcccaaagtgctgggactacaggcatgagccactgtgcccagctcaactggtattttgtgagggttgagtaagtttatgtattgtgacaatgcttggcttcatgtcagccaggcagccgatgccttttttttttttttttttttttttttttttgagagagaagccttgctttgttgcccaggctggagtgcagtggtgccatcttggctcactgcaacctccacctctcggattcaagcgattctcctgcctcagcctcctgagcagctgagactacaggcacgcaccaccatgcccggctaatttttgtacttttaatagagacagggttttgccatattgaccaggctgatctcgaactcctgacctcaggtgatccgcctgccttggccgggattacagacgtgagtgactgtgcctggcctagccaatgccttcttaattcttttccttcatctttttctttcttttctttctttttttgtttttttttgagacgagtttcgctcttgttgcccaggctatagtgcaatggcacgatctcggatcaccgcaacctctgcctctcaggttcaagcgattctcctgcctcagccccccgagtcgccgggattaaaggcatgcgcccccatgcccggctcattttgtatttttagtagagatggggtttctccatgttggtcaggctggtctcgaactcctgacctcaggtgatccacccacctcggcctcccaaagtgctgggattccaggctaagcagtgagcttagtcttgaggatatagaggtgaataaagcccgatgcctgtcttcaaggaatttgcagaatggcctaggtgggagctggggaacatgctcaaacaggtgtcggggaatagctctcacagtcctggctctcttcctgcctcgagcaccttggatgtgtttctttgcttctttgctatacctttgtcatctgtcaatgggacctggactggccccactccgaggccccatctgttctgtcattttctgacttgtcagatataggtcaggacaggcccgcgcctgccgggccagcgctgtagcaggtgaacccagggtgtatcagcgtttccctttaggccactcttgtcaatgctcccaacggcctcctccttcctccctgtgctgctctggggaggtctcttggctctgcccggcagtaggaacagtggagacaaagacagcttcacattctcttcagctgtcaggattgagagtggcggattcgggaggagaaaaatgagtcagtggcaactcgttgtgtgtgactgtgcagtttatctgagtccgcgggagccatagtcgtaggctgaaaatgacccttatttaagagaggctgagtgcgtggttgtggctgcccaggcgctttgctggactaggcagcctgggaacactaactgagaagtggacggggacaggagccagcctgcggtcctcagtgtcttacagtttcctggagaagtggatgtttcggcaggaagatggtgggtaaacacctggaacgatccattctgctcacttttctacttccctgtaccagtgccatggaatgagaggcagctccattaactcgtttaagatcctcataaagggagttaatatcctgtaattacacaggtgaattgcatttagcaggtccatttgaagaatggcagcgaaatggatcctgtcttagtagtgtgacctttactgggtgagttaaatcccaaagctagccaatttaaggatatggaaggaccttctgtggctttatttcttcatcacctcattttttggtttgtgtagatctttccacgttgcagtggcatttatgaagctgctgaggccttctgaaacttgacagcctgttatgcttcttttgttaataaagtttaacaaaactgttgaactcattctgagcagggggtgaaggggcaaagactgtacaggaaaacaggacataagtctgctttccttaaaagaaaaaagttaagagacaggacaagccatttcttttctgcctcttcgtattacaagttccttgttgctatgcctgttgcctgcagatagctgctaacacctcccgtgccctctcgatggcttgcctccatgcccatctgagtggcttaactcactcttctgaccacaacagcatgtttgatttggaggtgagacttcggttcctccttcttcaagtgctaaccagctggagctgcaaaaatcttctcccctggcaacctgaaggttgacttaaggctagaatatctttttcttgcatcattagtttttgggacatagcagagttagctggtgagagagatggcagtgaaaacacttctgggctaaacctactaaaccgtcaagtaaaaagtgactatgagattcgtggtgtttccttttgtccttcactctgctgaactctaattctcgccttttaagtcattcatttagactttagagtcactaaagaataagagactgaaattacaggtccaaaggtgtaaaggaaagaaagaaattcatctgaatggaaatagccagtccttgaggcccatggctccgccattctgccagccatgtcacatgatctcatttcatctctccagtcctggaaagtgggcattagtaacagctgaggacttcagactcagtgtgttcaaagtcacacaacttgggagtggccaagttaagactcaaacctgaagccactgcctttaaccgcgaagccatgaagtctcccagcaactgctacaaggggacagtgtccttgaacccaaccctgcagggcgagttgggtttaaataagcagagggaaaaaggaagagaattctgggcaagaggagtagttggtacgagcaaaagtgtgggggaaggactgtgcatgacatagaagagtgcctgctggttgcgagctccacggggcagggcaccagggcctctggagccatcttatatctcccagtgcctgagtggctatgcatagtagctgctcaataaatatttattgcatgagtgaatacttgaaaagactgttatcttctccataggctgagtaccctgagagcagggatttggtcttagaaatctttggatgttctgcaactcacagtggttaataaatagcaaacactcagtgagtgtgtcctgatgaaatgagtgaaggaacagcaggtaagggaaggtgagatgtgcttgagtgaagagtcactgatactttgagaaaaactgagcaatatatgcagactggcttggtaagggcatatcatggatggtcatcaatgccaggatgaggagctcttgtgtcctccttgagacattttttaaaaatccatctcttactgcacaacatcgtgggccacaggaacccaggcagtgctcaaactgatggctgcatattggaaccagagtctagcacagcttagaaatcatttttctgcaggactggccttaggctggccccattgtcactgtcttcccacttgagggtgaccacactgttacaaccgaaaagagccctgtgcaaacttgtgaatgggaacctgccagggaatagatgctattgctgggtcccgcagttgttttcggggtagttaggctggaaagtcccagccaacttcctctaagaggtgttctcaggccaggagttctcaataaaagcttccctctcttttcaggtgttggctacgtttgtggttttaagaaagcctgagggcctgaaggcagcccctggagaagccctttccgagggcattcggaaccttctggtcctagaggtgaagctgaactgtcaccaggacttatgacccgcggcttcgctcccattctgcccgtcgagttccacaagatgggctccttccgcaggcctagaccgcgcttcatgagctcccccgtgctcagcgaccttccccgattccaagcagctcggcaggctctgcagctgagctccagctcagcctggaacaggtgaaggaggctgcaggatgtggggtggagggctgccaagggccatggcagggagggaggcatccgggggctgactgagcttctgctgattctgggaaggccgtgattatgggggtaaataatgacgagagcaaattttctttttttccttttttaagagacagggtctcactctgtcacccaggctggagtgcagtcgtgcaattatagttcactgcagcctcaaacttctgggctcgggcgatcctcctgccccagcctcccgagtagctgggactacaggcacatgccaccacacccagctaattaaaaaagcaatttttttttaaagagatggggtctcactatactgcccaggctggccttgaactcctggcctcaagggatcactcccacctcggccttccaaagcgctgggattatgggtgtgagctactgcacctggccaagagagcaagttttttttaatatccagcgtgtctgttagctttctttgtttcagtagccagaaaatagaccactgagggcctctggcctgttagagtcagtttaccagactgggacagttgcactggaatttacggtcactattcatgctcattagtcacacctgaaactgtcagcctatccgagagtgggcttctataagaaaccttaagtaacctacttcccacttgggaagataaaacatgtctgtgaaaaattaaatgattggcataaacccaagattatgaagacctgtgagccacaggtgcttggaagaggaggcacagagttttgttaggtgtctagccaaccttttgtgcaccaagaattgagcagactgaatcagcactatgtcttatatgcttgtgggctactgtttttcaaatctttgcagacactgtttggagtaattaaatgcatcattattttgaagcatgactgaattctttgtagtttggatcgttatggatcttttctcttttttcttttcttgagacaatcttgctctgttacccaggctggagtgcagtggtgcaatcttggctaactgcaatctctgcctcccaggttcaagcgattctcctgcctcagcctcctaagtagctgggtttacaagtgcgtgccaccacacctgactgattttgtatttttagtagagacgggatttcaccatgttggccagactggtctcgaactcctgacctcaagtgatccacctgcctctgcctcccaaagtgctgggattacaggcgtgagccactgtgcccagcccattatggatattttaaatgaatggacacagaaagcaggactctgatgatagggatggagagagggggctccaaaatgttttggtgttaaatggatccctgttctttaaaggaaaggccaggggccttaatatagacaagattgtaagcagctcctttgctgaaacactgggctgtcgtcccagaggctgtggagtaagccctgatatggcctctcaagggactaactctactgccggtacacctcacacgagtggacatgtgaggagcctgtaaggctggcctgcgagaaattcttccaaggaaagtgctgttaaaaaggaaaggacttaccggttcatgttagctcaaggccaccaagcttccctgtgaagacagtggctgtgaaagaaccgcaggcatgggtcagcttctgcttgcaggaaatgccatttggaatctcccaggtccatgcagtttcctgcgatcagatcccactggctgcctttgactgtggctgcaccagcagggccgccagcgaggtgagggaggaagacctgctggcttgcaagaaagcgggggctgcttttgagtcctttcgcctttggtcttcctttctctccaaggacactgaggaaatggaggatggatggagagtgtggccaggtttgtgctatgagcttcctggtcactccacacaccttcagccctgagctgctattgaaatggcccaagaagggagattctctaaccaggggttattctcttttcctgtagcgttcagactgctgtgatcaacgttttcaaagggggtggcttgcaaagcaacgagctctatgccctgaacgaaaacatcaggtatgtggcaggccagacttggtgccattttcccctataaacctgagcaggggcataggggctaccgccttaggagccttaagggttttttttttttttttcctgcttgattcttattgcttcttctgtcagctatgctgctttcatggctgttgcgttctgagacctgtgtctgtctagacttctgatccatagagaatcatttgttcagtatgtagtgtgttttgtaggggaaggggtggagagttgatagatggcagctgtcatttattctgtaagcatttattgtgcccttcctaaccattaggcaccataataggcaattcagcttagttgttggaaccagactgcttgaggttttattgtgttcttccttttactaagtgacttaccagcaaacatttgagtgcgtctctgttggccaggcactggagagacagcaaggaccaaagacagacatggaccttgccctcctggaatttatattcattgggaagagaatcattagtcaactagccacacatgtgaaatgtaaacatgcaactaagacagctactccaacacagctgctgtgatgaaagcatatgttaaaatgacttgatttttgtcaaggaggccaggaatggtggatgtgatgctgctgctgtgatctgaaacatccatggaaattacctaggtgaacagggctccagttggtagaaactgcgcatgcaaagttcctctggttgcaatgagcaaggaaccaaaagaaggcccatccatgtgcatagagcaccagaagttgagtagttgtgcagttaggtctatgttttggtgaaatgagagcagcaagtcaggcagggctcagagcaccaggatcttctagggacaggagatcgatccatcaggtcttttttttttttttttttttttaaacggagtcttgctctgttacccaggctggagtgcagtggtaccatctgggctcactgcaacctctgcttcctgggatcaagcaattccctgcctcagtctcctgagctgggatcacaggtgcccaccaccatgcctggctaattttagtatttttagtagagacgaggtttcatcatcttggtcaggctggtcttgaactcctgacctcgtgatccacccacctcagcctcccaaagtgctgggattacaggcgtgagccactgtgcctggcctccatcaggtcttttcatgtcctggtattcattcgtttctggatatgttaagtgcagaacttcaaggctaaagacccaaccctggagtgggcagaacaataaacaagtccattgttctgttcctgtttactgttagttaaggcctgcattaaggtcattgaggtgttttaagagctctactttcattaaagtctttagaattgtattaaatttccatccatgttcttgaatttcacatcttacttacataaatatggaaaaagacaaaagatatctagcccaaggcctcattttacaaaggaggaaactgaggccccaagaagttgagtgacaggggcaaagtggggtcagccaacacacacgttgcgaagtttcatttttctccaagaactaaaattctggcctttccatgaggttctttagttcacaatagaagtataaataaataaaacagtgactcaggaatgtgctaattgtttttcactttgggaggctgatcctgaaattgtacttaaaagctctgtttgtggacagctgggagaggtacaggtcaagccagatttcaccagcccaggtagcccaggagctgctaactcaaaagacttcaggtaccaagcaggtcttctgaatgggtgaagctggcgtggatgcctggcagtgagatcgtgccctctgtcaaaagaggattaccctggtagaacacaggcccactgatacatctcttatttttcaagaagaactggaaattgagatgtttatgtaaattttctgacttttaaatgttggtaaataatccaaatttccccaaacattggtgcaggccaaacaaaacacatctgtggattgaatatggccaagaagctgcccttttataacaccagccattgcatgcattggggaggcattgctgcttcagagtgttgagtcccagaaaatgctaggtgcctttctcctccatcaacacattcaaccctccccacagccctttgttatgagtagttgataaatgagaaaatcatgcattagagaaattaaataaaagtcacacagcaatgagcagtggcaaaaggatttgaactcctttctgacttagatacctgtagtagtctaccggggctgccataacaaataccatagactggatgacttaaacaacaaaaatttatttctcaatgtcctggaggctgggaagtccaagatcaaggtgccggtcatttacattcctggtgatggccctcttcccgactggaagatgtgtactgtgtgtacacatgacctcttttgtacttgatggggagagagagctctctgatgtcccttataaggacactaatcatgtgggccctactcttatgacctcatctaaacccaagtatctctcaaaggcccatctccaaatcccatcaaattgggggttaaggctttgacatataaattttggggggactcatagcaacacctttgttctttgcactatattgtagtgtcagaaagagaggtcttatgttgggagaaggattaagttgatggttcctgatctttttttttttgccatcgttcctttcccgaggtctctgtgagcccatctcttatcacatcctgtgactaacactcatcatgaggagcatgacactcccccagccctcctttccagtgttggggttagggctgctagatgttcctctgtgtcttgactgatttttcagactagtgggaaatacatatggttgaggtttgaaactatgtgcccagatataaattgagcccagaataagccaaagcttaaaaaaaaaatcagagctttccttccccatgtttctgtaccttacattctagccacactattttagagaaggccagaggatggagataggctttcacatcagagacacagaatataactgaagatgtgaagtatctcccaggcattgacgtgacctggatgtctcaagttgaatgaagctagccctcccacatcagcaagtgcctgtgtggaggtaaacacagctgcctttattccagcatcttaaacactgaaataggctgctctctggttacattcaagtagacacttgggttttgattttccttttggaagacttgtttgcagaacagatctatcaactcaacatggttgaggcaggattggtggagagggtggggcacaggatggtagggatgtcagaaagagatgtgcaaacagagaagcctcagttcttcagcccatttttcagttgtgacagtcctgttatatgcaagagggtttgtgctaagtttaatggaaatttttaaccaaagagagcagtttctggattcagagagaccagggatcaagactgggctagctgtgtgaccttgggcaagtgacttcatttttctaagtctgttttgtcttttatgaaatgaggataataatagcactaacctcatggtcattgggaggattgagataatgctaaaagcatccttagcacagggtctggtaatttaataaaggtttaataaatattagccatatgattcttattactgtgaacagttaagaaatagtaaagtgatacataatgggtgagtacgaggcatgagaacacaggccaacgtgatgaattgccccatgaatagtgctgtgtataaccctctccaggccaggtgtcatgctcccacctgtaatcccagctctttgggaggctgaggcaggaggatcgcttgagtccaagtgtttgagaccagctttaatgaaaccccagtttctacaaaaaatacaaataaaatgaaaagctgggcgtgatgatgcatactgcactccagcctgggcaacagagcaagatcctgtctcagaaaaaacttctccagcagtttggatgaggtgagctcactttgaactagagagtctgggacagaatcctcaaagagtggtgcctggagttgaagtttgggtgaggctaagttcttacaaggagagccagctgtttctcctttccacagagaaaagaacaagaggaaatgactttttcagttctccattctactgaacccaaatggtaataaactttttgatggagtatccaagtctggagtcaaagcctaaatcagattctttgggtcactcatcccagccaccctggccactttctatctgtagggttagtatgtacctgggaaatacaaatttatttaaatagtagccaatgcaaaggatgactaggaaggtagatgttttatgtaactgagtcttgtaatgcagtcattattataagtggcctttccatttaagacatgtctttgaaaatagactctagtttaaatgttagcagatagactttgaagtaattatgaggaagaacttgggactgaggatggtcaaattctaaaacacagtattggatccaaagacaggtttctccaccctttaagaataaatctgtcaggccaggtgcggtggctcaccccgtagtcccagaactttgagaggccaaggcaggtggatcacctgaggtcaggagtttgagaccagcctggccagcatggcaaaaccctgactctactaaaaatacaaaaattagccaggtgtggtggtgtgcgcctgtaatcccagccagctatttttgggaggctgaggcaggagaatcgcttgaacctgggagacagaggttgcagtgagccaagatcgtgccacactgcactccagcctgggggacagagagagaatttgtctcaaaaaaaaaaaaaatccatcagaaacgtctcacctcaatatagcggccaatgttgtcccatgtaaaagtcagggcacatggtctattgatatgaaaaccataaatcagaatatttcccattgaaactgccttaggcacagcttgcacattgtaatatctctcaaggcaagaaaatgacctttcagaatagacgtattctagctaaatccccaggcatcccaatcaacaattctggcttccctaaatttccatctgccagagttcgggctgattctgggagtcttcttgttttgaattctcaatggggtgttagtgcggtttttaacacccctctccagcctcacccctgatgtggctgcattttggcagcgaggaaaagtctgggttagaggtttgggtttcatgagcccttccaagaacaagagcagctaagctgacacaagagcacactctccctaaacagtcttttctgccacctctcccactgattttatgtaaccgagaagaattagaaaagtgtgaaaaaagcaagactgatgtttgctggttctttgaagaacctgcttgccaatgttcttataagtgctttcagtctttgagtgttggggtgtgtgtgtcgaagcaggggccattgattcattgatttatttattgaataaatgtggagtgctctgcccagtactgggctgtatactggggtggtcattgagtaggtggtttgtgtcttggagatcttacagcagaatgagagaggaactgggcaggtagttctcaggcaacgcttttagaggggtgatggtggaatctggagtgctgggggcatgtggaggatgggcacacaattagacctaggagaaaatgatatccaagttgaaatcagaagtgggagcaggcagaaagggcagttgaggatctaacgttcttgccaccaccactcactccatgccctcctgcctcctcaaactccctgggaggactttttctcggcagaaataaatgctcagagatgaagtttccggaaaccagagatcagttatctgcagccggcctgagacaggaaacgcacattttccttctctctccaaccaccctgcttctgttcttgttgggaggggggaggtggtgtgaagaaaaccccagagattttcaaggaaagaggaggttccaagaattgtgtttgatctctgacaggtctgagttgaaatatcttccttctgagtcagttggttgcctgaaacccaaagggaaatccacctccgatttttccatctctttaacagagtgttgactgtaagagagggggacccacagtaggggggaagagctgggaggggacgggaggaaggtgagcctggatccagctcacaggctgatgccatagaccagtcccaggcctgatgccacgaggtaatgataactgcagacacttgcttagccttttagtatatgccaggttccaagtgcttcatatgtgtcaactcttttaaaactccccacaccctgtgagatagatactgtatccctgtcttacaaggaggaagtacagatacagagaggtggaataactcacccagagtcatgtagccagtaagtgcctgagctgggatttgaacccaagcctcccacatgcttaaacccttagtaagtgggctgcaagagccacacagagctggcattatccagatttgggcttgatgtacctggacataggttcatgaatagatcatgaggtaaggggggcattgcccttctgaggagcctagttttggagggattaagatgagggctcttcttggtctgggtgactctgcctgatgatgtgttactaccttgtacctgctgtggctgagaaacagacttggctttcaggttaagaagggttgttagaaatggcagattggaaacccatggggttggcgcatgtggtttggcctaaaagttgtttagaaatctggacatctcacctagaactccaggtttccggcctctctggaaaggtcagatctgggcactggactcacggtctggtgtggagcctgtcaggggagctgaggcctggctgctggctttagagggactttcttggtccttacagtacacactcacttgcctcccttctttgcctgcctgcccctgtggcatggggggtaccactgcctgattaggttggcctccatttgagttgggatctaccaatgtatggcccctggcaaagctctgagcatcgatcttatctgcaaaatgaggatacactcctacctgtgaggctgttggagaatttgagattctgtgtgcagactgccgagcatagtgtgccacataactaggagctcaataaatgctcttcgtcagtttcctccatgtttctcactattcccactgccacccactaggatgccgacacccgaagggtgtgagtactccatgtcctgagtcaaggacaccacctcccatgggctcccatggaatggaccagagaaggggagggggcctttctatctgttcctgcttaagagaagctgcctccttgaaacatatcctattgcagaagtgaggtgggtgatttcagagcattcagcagtcaggctagatgggcactgaccagctacagcactgggcacaggactctggaggacccctgctgttcctggatcttgaggcggtctgggcggatctcaccaaagggccagggtgcagggccagagaacttggggcaaaccctacttgccagatggcgcagaaatattaactactgatatggttattccaactcatcttggctaacctgcagcacttcttgcaagctgcctcatcgtctttaacctcatgtgggaagagagttgggacaagcagcgggattttgccaccttgggtctttctctgtgtgcaaggcagactgactccatccgaggtgatttccctctgtcacttccgcgcttgcccactctgctgccatcctgctgtccctgcgcctctccaccagcttgattccagcttttagtaatgcctcctttacctttaagcccacagaagtgggaagttgagttgacaagacggtgaggcgtgagatcgcaggtctgtgtaataacaggaaatcctgtcaactggggtggtgtctcagctggtcagcctgggagggagaaagggtgagataatgtagaccagtcagtgcttccccattttttccccctgttatggctccttttggcttctggctgaacttcacgcccagtttctcattttggtcaggccccgtgtaagtgtccccttcacattaccctcagctcccggcttccctttttctagctcagtggcttgtggtggtggttggtagcagcagaattctgttttcaaatgaaaccaggcatggaagtccaatatgtgaaacagatggcatatgggggctgctgaggctgaggggttgctttcatgtcagttacacgtcccggcaattcttttctccaaagctctgcctccaccttcctaccttcttatcctttcatcagctagtctggccctacctaacatattacctgctttatgaatttctcctgggtcctcaatcccagtgtaggaaatgctagtgtggctatacttgtaggaagatgcgagaagcagtgggctggagttttcaagacccagggcttcagagtcctgggtgaaatcatagtagctcatgcttgccaagccttgctgtgggccaggcagcgttctagcaatttgatgaggattaacccattttacttgtgcagtaatcctgtgaagtaggtatccttatcctccccacattctaggtgaggaaactgaagtatgaagaatcagtgaattttcccgggtcattgctaacaacagctactaagtggctgccaggatgcagagccaggcagctctgggctccctgatctcaacaagacacttgttatctctggcctgtgcttgcttgggtcagtttccttgtatattaaaattgaggatattattgctgcttacagttctgttttaggcttaaatgtgggaacgcctacattgttgacagtggtgtccagcacccagcaagtgctcaataaactttaattggagaaaaaaatgccgggttccatcctaggagcaatttgtttattattcgttatgatgatgatgattgtttgttctaacaagtaattgcttttctgttgacagggcagcaaccctaggatagagtgggaaaagcggaaggaaggctgccagattctaggcctgagcctcaaaggagcttatggcctaggtattaggaatcgggattttcatcttccctgcatctagggaaccacaaaccacagcctctttaatttggctgtctctctccagcttttctcttctttcttgttctttacaaattaaattggtaaaagtaagtcaggctacagggtgaattgtcccattgtgattttggcctaggtgtctaatgccttgatattttttactgtcatcttttgggtaagatgaacctcctgtgccctataagagagtggcccagatcactctctcatagggcccaggagaaatcattgagctctgtttcatccttttcttctagcatccagaaccatgtctaacacataacattatgttttcagtaaatggctaagattcaaagaattaatgaatggggtctccactctgagttcctctttttttggtggggggaaggtagcttttaagtgaggaagcgtctgccaagttccactggagatggtgtatcggaacagaggtgtggaaaatccccttctctcaattcagctgagacaagaatagaggtttttttcagaagcattctttccttataaaccaatgcaagcagaataaacagagtatatacatggattgtagatttgtaacatgactcagccacagtctgctcacaggctggcctagccagcactgctggggactcctggccccctttcctcatctcttcactctctatagtcctgagaacaagggttcttgggttaccagcttgaggcaggtctggattggtggattcccaggacttgtgggattctctgttagctggtacacaccctgcttcctgatgtcatgaccttggtagggacttactcctgcgattctttctcgggcttctggccatgctgcggtaaccttggtggtggttattaacttcagaatcttaaaaatttgtttctgaataggattgttttgacatggttcaaaaattttacgcatatagcaagggtatacagtagagtctccacccctgtatcccagaaaccagttttccattctcttttccttaaagataagtattagtaacggtagcttattgggtattcttccagagtttctttatgcatgtataaggaatacatatggaaacacagctgatgatactgtatactttattttatttatttctattttttattttattttattttattttattattattatacttttagtgtacgtgtgcacaatgtgcaggttagttacatatgtatacatgtgccatgctggtgtgctgcacccattaactcgtcatttagcattaggtatatctcctaatgctatccctcccccctccccccaccccacaacagtccccagagtgtgatgttccccttcctgtgtccatgtgttctcattgttcaattcccacctatgagtgagaacatgcggtgtttggttttttgtccttgtgatagtttactgagaatgatgatttccacttttatccatgtccctacaaaggacatgaactcatcatttttttatggctgcatagtattccatggtgtatatgtgccacattttcttaatccggtctatcattgttggacatttgggttggttccaagtctttcctattgtgaatagtgccacagtaaacatacgtgtgcatgtgtctttatagcagcatgatttatagtcctttgggtatatacccagtaatgggatggctgggtcaaatggtatttctagttctacatccctgaggaatcgccacactgacttccacaatggttgaactagtttacagtcccaccaacagtgtaaaagtgttcctatttctccacatcctctccagcacctgttgtttcctgactttttaatgattgccattctaactggtgtgagatggtatctcactgtggttttgatttgcatttctctgatggccagtgatgctgagcattttttcatgttttttggctgcataaatgtcttcttttgagaagtgtctgttcatgtccttcgcccactttttgatggggttgtttgtttttttcttgtaaatttgtttgagttcattgtagattctggatattagccctttgtcagatgagtaggttgtgaaaattttctcccattttgtaggttgcctgttcactctgatggtagtttcttttgctgtgcagaagctgtttagtttaattagatcccatttgtcaattttggcttttgttgccattgcttttggtgttcagacatgaagtccttgcccatgcctatgtcctgaatggtaatgcctaggttttcttctagggtttttatggttttaggtctaacgtttaagtctttaatccatcttgaattaatttttgtataaggtgtaaggaagggatccagtttcagctttctacatatggctagccagttttcccagaaccatttattaaatagggaatcctttccccattgcttgtttttctcaggtttgtcaaagatcagatagttgtagatatgcagcgttatttctgtgggctctgttctgttccattgatctatatctctgttttggtagcagtaccatgctgttttggttactgtagccttgtagtatagtttgaagtcaggtagtgtgatgcctccagctttgttcttttggcttaggattgccttggtgatgcgggctcttttttggttccatatgaactttaaagtagatactggatactttctacagggtctgtggactagactgggttctggtgatgtggtgtttgtgggacagcatcttcctcaaacttcagggaatcaagctggctaaagtgttgtgttgccttacgtaatttccagcaacaacttcaagcttctccaaggctttacatgtagacatagagaagaggacacacaacccagtgcttctttacatatgatttttaaaaatgcatctgtgggccaggcacagtggctcatgcctgtaatcctagcactttgggaggccaaggtgggcagatcacctgaggtcaggagtttgaggtcagtctgcccaaaagggtgaaaccctatctctaccaaaaatagaaaaattagccaggagcagtgttgcgcgcctgctctcccagctactcaggaggctgaggcataagaattgcttgagcccgggaggcagaggttgcagtgagctgagatcacaccactgcactccagcttgggcaacagagtgcaactctgtctcaataaaaaacagttaattaattaaaaaataaataaaatgcatatgtgttctctgtgtttaaaaatcaaggagctatatatttcaattctaagggcctatggggaaaccccttcatatagtaatacagacttgaacagcaagttataagagtggaattgaccaacaaatatgttagtgttgtgtaaactaaaatgtgtattcttatttttctcttcccattttacaaggtagcctgttgtatgtacacactgttctgtatcttgcattgtttctttgcttactatgacttagatctttcatattatttagagcacttcttcacaccctttttaaaatagttgcatagaattccattgcctggatgaacataatctttttattagcactttattggtgcatatttatgttgatttctatattttgctgcaatgaaaaactctgcatatatatatataacatgtgaccctgtctaaccatgttatcatgcccagacagaaggcaggattttgtaagggataagggcagtgtagcttactgatttgcccaggtagagcaatagaatcttgacttaaattattaagaaaggtcttttctgttcagataattctatgaacagtacctagtggagaaggttttgcattctggattttataaaaggacaagtgtgtggttctcctactgtacctggctatggcccattacatttaaagtatataaagcagattaccacatcgtgtctggttcctcctcagtaaagaaatggttatcactatcagcatggcgaaaggcccctcttcatgttctacttctttattcctaaccattaccatctcatcccccctgttacagctgcttctagcttcagagtcctttctgctaagtctttgtcttggaagttgcattgtctgctctttagcttctgctctgttattggctgatttctacctagacttttctcttcctgggacactctgcagaattctggccttggctgtggcttgctgcaccctagctgcaatgtaaggctgctgtgcttccaccctccctgtagagtgaagccccttcgtgccctccctgataggaggggaggagatgtcttggattcctcaactgggtagcatcaggatgcttttctgcatcccgctgtgagatgcctggggcaacctttacttgttcagtcatatctagcccaaactcacaattattacaccatcatagatccctcctccgtgctgctctccaggagtgtgtccatagttttttattttgaagtcccccttaaccccgacctttttctttttcaatcttacccatggcatcttcatgagcatagtgttttcccactgtgggttccttgggacaccaattccacagcgtattatttgatctcagaagcacattagtccctcagcatcatgagtacccaagatatctccttgggaagctctctcctaagtagcctatcagtaggacttgtttttccacttgtgcgcaaagcttggcttcttcacctatggttttgagacttcccaaggatgacgaagactttgttaggaggtgtttctccctcctgtggtcagaagcaatctccttacctcttcctgtttcaaagcctccgtccacttggggctgccccataggttgctgtttcctgtctgagagacatgtctagcctctgcctcaaagactagtgatgcccaacccgctcttagtccagtggcttttgatgaaggcttccctctcggatcagacctgcccacatctgagagaactcctgggttgtgttgacagggtggccctccatgagactgcctttaaattggccctcaaaatgcagcatccacaacagacaaatattctgtcatgggaaaaggaaggtattttctttgttcaacgtgtgtttgtggctttccagggctttttctgctacagtaattcaaatcatgggtggttctctattcttttgtcttaattttattgtgcctgttttctctgcacataacatcttgctgtaacctcctgtttatccttcagtgacatgagtgaacgtgttttgggggagtgaatactcagcaagcgtcgtcagaaacttgagcatttgctccttaatagccatagccaatgggatgagcaaagaaagtcatttgaaatcatgaagggtttactcactggatctggggagccagttattcttgctttttgttcccttaccttgtctggatcaaaataaagaatagtatggatagttccattatttgtcacagggaaaaggagagctggtgtcaatatccctattttccatttgtattttattagcacttaagattcgttgaaatcatcttgtgagtatatttattaacgtgctatctatccatcagcccccaagaagagagcagagaccttgtctgtctcattcacctttgaactccttgtgctagaacaacgtgtaacacataaagagctgctcaatacatcttcgttgctggataaataaaatctctctattgtccctgctgtggtccccttggaagactgcctcagtccattgggcatgggttgtaagaccacccaaaccatggtaccaagttgaattttaagttagggtgaggggagggggttctggatttggaggagagacagggtggagttatgggaaaagatgttgaatttgcagaaagtctgggttcacatcttggctctgccactgacttattttggggaactctctgaggcataattttaaaaatctgtacaggaagaataataattactactacccgcggtggctcacacctgtaatcccagcactttgggaggccgaggcgggcggatcacgaggtcaggagatcgagaccatcctggctaacatggtgaaactctgtctctactaaaaatacaaaaaattagccgggcatggtggcgggcgcctgtggtcccagctactcgggaggctgaggcaggagaattgcatgaacccaggaggcggagcttgcagtgagccaagattgcgccactgcactccagcctgggagacagagcgagactctgtctcaaaaaaataataataataaataattactcctaccccaccccacatacattttataatccttagttgaagaatgtatgaaaaatgtgttttaaactataaagtgctctgcaaatgtggaggagtgcaaaatgatgatctttctcttccttctttttgcttcatataaagtcaggtgccctggcctgcccctaccagctctgctagaattaggatttcctttggccagctgccctcttcacagtgctactttctcagagtgaactgaggaacgcatctccttctaggcttcccatcactgcaattccatgataacaatgggggaagggggaccaggacctaagaaagtgccctcaagatctcagacctggccccaccccgtgccactggtgagcacattgtcaccatgagctgtaccatcaagggctgcttgacggtgtttctcttctcccttctccccaggcggctgttgaagagtgaacttggatcattcattacagactattttcaggtaagctgtgtggatctgagcatccatcattatcatgcatgtgggggcatggacctaaaaggggtggccaatactgtacagttggacattccttcaacagacaaaattacgtatctcaagtccctgctgtgtgctgcacgttgcagaggggcaccactcctgtgtctcccagcagttaatggagatcacagtctcatgcagcagttctcaggcattttggtctcaggacccctttacactcgtaaaacgtattgcttatttgggttatgtctatctttaccataatagaaattaaacctgaagagctttaaaatatgtcttaatgtatttaagtaataagcctattacatactagtgctaattacatttttatgaaaaacaactcagaataaaatagaaaggagatctctgcattgtctggcttcatagaagacagttggattcttatatctgcttcactttcaatttgtaatgatattgcatgccacgtagttttgggaaaattccactgtaaactcgtggagaatgtaagggaaaaaaacaaatagcttagtattaccgagaaaatagttttgaccatggggatcccttgaaagagtttgggtagtgggggtcccccaggggaccctgaatcataccacatctggatccattgtctggatcagtcagacttctcccctgtctatacattgttggtataaagctagtgagtttaaggttccaggaccaatcagaggatagtttctaattcacagacgcaagctgttttcatgactctaaccaaaggcatatggtggagagggaatggggagtgttgagtgacaaggagtcactgactggacggcaccttagtgaagtcagaatccctacttctcactcatttgctgagtgggcaagctgtttcacctccctgtgcctcagtttcctcatctgcgaaatgggactaaaaatacaacttaccttaaaagtttattatatgctttatgtgaaataacacatgtaaagcactctgtacgtagtgtgtaggggggcagtatagggtagtggtcaagatcacagcctttagaggcagagtgcttgggttcagtgcccagcatagccacttactagctatgtgaccttgagcaagttgctttacctctctgtatttccttttctgtgaaacagcagtaataggaccaaaccttatagggttgtcgtgaagactaaataagttatttataaaaagtgctcagtgactagcagagagtaagacagtaataagtgcttattaagtttatataagtgcctatgtgttattctaaggtgtaatccatctcttttaatgggaaagtagcatgaaatgcctaacatcttggtttcaagttagcaatgttattctgtgtccaaatagagcatacttttaagacagtttaaagagattttaggttttgaaaacagtacaggcatccttttataatttttctttatgagattcaggaagcttaaacttttatgtgcactttaaaagaatgacatgtcagttgtttaaacacacacacacacacacacacacacacacacacacacacacacggacagctcctctaaatctggacaaaccaagacccaacagaagcctggaattcaatcgggtcatatgtctcagctgcttggaagacagctcctgttcagggagagacaaacataaagattaagagagagataattagtcacaaatgtgaatcatttcagtcacccttgactcaaaggtcagtcttggcctcactctcttctcttgctgtctctactgattgattttttttaaagctaactacagagaagtggtttttcagtcagtcctggagaaacctgctgggttgaattgccttcctccttgacatttaaaagctccatggtttggtgtggtttcaatcaggttttaaatgtcatttgtcttttggtgctgggggttacccctaggacagataggaaagggtgtttgggtggggacttgtttatctgggaagccttgaggtttttgggggcggttaatactgcttacgaagcatgccagatgcttaacaactaataaccacttgtcatttcctaccgggaacataatcagaaatgctgctttgtgaatacagaatctcttgctggggtgtggggcgagaactagttttcacagttttaaatcgaagtttatttaaggtgctgatctggaaagaaggctctcctagatacagttttgtttttttctttttttaatagattttaagtgtcatgtgggcacacagcttttttttctttcttttttagtcttttggttccccactccctacaaagttcctggaacaaagtagatactcagtaaaccttcctgggagagagggagggattttctgccacagatcactgaaatgattttaggcgatgcgtgcaatgacattaaataacattagggcttgtggttagaaactgctctcctcttttattttcctttcgcccttgggattgtgctagagaggatcttgagttgtaccatggtgtcctctcccctcctccaggacttggaaatctccctcgtttgaagaaggaggagcagtcctcgaacttagtgtcttcagctagggatgctgactagttaggatttcttaacattattttgttggcattgagttgatcattgagttccattccacttagtgtaaattatgttgctgtggtttctgttttaaacgtatttacttgtttaaaaagtggattgatataagaaaaatagtatgcaaagaataatcatgtaggtggccctggctctggccctagtcatgcaggtggttcaacagagactcagatttggaaagcccattaccaggcactgcttaaaaatgggctggtttcaaaccattcactttacagaagaaatctccatataaggagacacgtcccagagggaaggcttgtagaggcgagcttagccttcacatttgactgtcagatgtcgtttcaggagggaaagtcaggaggaactccagaaagtgtgttcctccagtaaaggggcagaaggaaggcctggagacagatgaggaatggaacccaggggtggacaggaaagtcaccaaaaccatggacctggctgttgggaaaggtgaaagatgggcttcctgggtgctgggctctgcattgcagaggctcagatggccatgcctagacatctgcattcagcagtcaagtctgtctcctcaccctgacccccaactctgagcttgccactcatacagccctttctgtggctctgcttttgaaagcgaacattctcatttacattctgtgagtcttaacacagaatgtcctgagtggggaataatgaaaatgaccccaggtgaggccaagagaaagcaggtaggaaaattgtgcttatctcatgcctgcacacagagaagacaagctgtgtgatctgcagaagcccagctacacgtccataaggcactggctggaaaagtctctgacatttccagtattgatttttttccctttccctctgttttgaattgtgtccggaaggaaaattggggtttccgagagaaacactatatactagtaacagctctgagggataattggtttcttgtaatttttgaaactgatgatatgaaacgttctggattttcctatttacctcattaggtatcttggtggttcagagcatgggtgtgtttgcagattgcactttctgctattctgtatctactggctttgttttgtgtgttataagcttttgccccaagcccagaaagttcaattccttttgttggaactggagttttgcttgatatagaaactcaggctagagtcagtggctttgaatgggttaatactaggaagagaggaaacttagctactaccgttgtcaataggtcatggatacctggtaatgtgtgagatacatttgtgtgcatgtatgtgtacgtgtgtgtgcatgtatgcatatatatgtatttttccatttgctgctcatatctgcaagagtcccaggaggccagtttcccctagagtttacagcatatggcagagagctgaaggagtgtagcgttaactgaagacccggatggatggcaaagagtttaaatcaggcccagaaaaggcaattatactttgttgggacaaaggtaggacttctaaggattcacggcaagctggatggagagaagatcaagagtggtgaaggtaacttttgtgatttctaaatccaaattgaggaggagagagaagtttcagctgttctttgatcagctggacaggctcctctaacaagcaggactcccaaaatggaaaaagagctaattgggtgaacagaaagtagtaaaaggaattccacatacactctgctttgaaggtaaaattggggcctatctacacaggggggctttgaacaagtggagcggggatctggtgagaagacagaggagaagttatgtttttaggtgagaggtcatcagaggttgcattttttgatttggccagtacttagagaagaacagcactgtggaatctataagctttggggtggcctagaagctcccactggccactgtgaggggcgagaatgagggggagccagactgggggcttcgagaagcacccctgggtgtcttgggctactcgctgtggggctcgctgcctgtcagaggtcacctctcagcagctttgccattcttaatctccttagcaattatttgaattttgtacaattagttgaatactttgattgtacttttatcatactttatgagtctccgtggaaaaaaatggatcttgacattgatgaccacaggtcttaatataattgagataaagatgaaaatcaataggcttgcagaagtggcaaatctttatcctcattggactcaggttattgcacatcagttgtggaagaaaggaacacatgggtaccaaaggctgaaaatatatcacccgaaaatgagctctgaagatgaggtgtaattagggattttataatcctttcaagctctatgaggacagaattcctcctaaatcatggaagtgtggtattctacacaagtatgtatttgcaagaactcattatatatggaatttggtgatttactgtagaagagaaaggaatggcaggagccaggcttagggcattgatgggggaggcataaaaggtaggagcagatgctggaaacaacgtggtattaaaatagtggaaacactcagtgattcagtgggcatgagaagtagaaactgagttggaagcgtcgggaaatttttgttcaatatggaaagcaataaggtgactttctctgaggctcttgaagagctataaggagaacagaattaatgataatggtagtgacggctaacattttcaagcacgtacatgctgggcattgttgtaagctgaaggttctcaaagtatggtccccgaaccaggagcttcagtatcagctgggaatctgttagagaagcaaagtttaatggattcagaaactctggggttagggcccaagtgatctgtttttttttttttagacaaagtcttgctcttgtcacccaggctggagtgcaatggcacgatcttggctcaatgcaacctccgcctcccggattcaagtgattctcctggctcagcttcctgagtagttgggattacaggcgcaccccaccatgcctagctaatttttgtaattttagtagagacagagtttcaccatattggtcaggctggtctcgaactcctgacctcaggtgatccacccgcctcggcctcccaaagtgctgggattacaggtgtgagccaccgcccccagccacaatctgcgttttgatgagtcctgcatgattgtgaggcacgctcaagtctggcaatgctttcagcatttcccctgggctaactcatttattcctcctgataactgatgaggacggttctgttattacatatccctcttttacagatgctgccactgaggctcagagatgggggttatttgtctaagatacaaatacatacagctagtaaatggtggcatgaagacccagcccaggtcatctggccacagaagaaaaatctcttggattatatttaaaatgccctcaaggaatctccaggaaaaaacccaaaaacccaggcaggaggagttccagggttactttatttgttgttgttttcgttttgcatgttcagcaagtcagacatggactgtcttccttcttccttataaacataacctttttaaggccccaatgcacgctttaactatggctgaaacagtgctaaatgaagaattagcattagcaccgaatttccacttcttcaatctccatctggggacttctcgcgggtctcatcacacccacacacaccaacattggcttattaggaactctctgggcctgggagtaagttgtgtttgtaagactttgttgtttatctaggaaggcatccaggttcacaggagatgtgcacatcattagaggtgatggctggcctttcaaagtcatagaggaaaaaaaaaaactggaagtggcctataatttgcagccctgggtttatgccaacaacaggaaccttctaagacattgatatcaccagaagcaaatgtctggagtgaaactggttaacacaggttctgggaaggcagagcaacacagctgccacccctctggggtaggaaagaatatctcacttggaaatggaatccactcgagtgccaggcactccccttgctagatgttgaatgtggatagtcgagaggaaggcccagctgggtggaggccctgtggcagaacccagttacatggcctgagattgccaagccaactgccccagtatctgaatctgtaatggatcccatctgctttctcctctgggcaaggacataggacacctctctaaggcaggagagcatgatgtctaaaagcaccagcccttctgccagtaggtctgggttctaatctttgttagaacacttactaatctaatcttctaatctttgttagaacacttctaatctttgttagaacacttactttgttagaacacttacctcagcctcgttacttagtctctctgatgctcagttttcttaatagtaatccaggtggaatcatgggaactacttcatatggttgatgtggttactaagtgagatgacgtacacaaagtgcctgattacatagtgagcagtcaacaaggtataagtatttgtatcagtatttttattactattgctaagtaaaccagaagaatataataggggaaagatatgggctttggattcagaccaaccttggtgcaaagtctggtctcacacttgctagttgcttctttgagcctcaagttctttatttgcaaaaagtggataggttgtggcgaaagtaaaatgtgagaaggcaggaaaagactgtaagacagtgtctgacactgagtaaaaaccaataactgactccactgacattcttactgcattgtcatcaccactaaaacattaaaagggacggtagctagcagccttagtgtttacagaattcctgcttcctggtctgtgtggaaagttcttcctgctgggaagatggggttctccctgtacctagccttcttggttatccgtctcatctgggtccatcccaccgggttgtgaaggtgcctgcttggcaggaggcatgcatcattggtagccccacaccacccatggccaccctctgctctgttctgcccacctttccaacccaccctctgtgatgacccgggaggagctgggtctttcctgtccactgaagactgggtggttttagacgcctttccccaaacatcttgtttacatttttcctagctaagcctcatttttctgtttgcagcccgtttttctatgtcttaggaaaattagatacgtcagctgtttttctttttcacttccatctcctttgccacttcattatagtgcgacttgactgtgtccaagttcatttatggggtggggagaggatgcattaagtaacaatgggcccagttccaagtcccaagttgcttcctgggtggttactatttagtaaccatttttggcttagtcttctgcctggggaggtggtggggttggtgccatcaggcaaggagtgggacaagagaaacttgggtcatctccagctctgttaccatacagctccatcactacagctcagcagccagcaaacactcagaaacttctggagtcaggcattggtcaggggatgggaatactgtgaggtgaggtccaggaagactggacacttaggaagaacaaacaatgcaagatggctgcctgaaacccaaggctgggtttcgccccgccttcaacccatttgagcaggcttaagccccacagatgtcaagttggcctatctttaggtgaagtgacagggtgagcttcataatttgcagagcccagtgcagaaggaacatgtgggtactcagcattctgtgcaagaatcctgaatgccattcttctcaccacctctaatgtcaacactggtgtccctggcttcttctaaaacaactctactcaccagactggtgtggggatgccaatctccccttcccactggcctgccactgcagctcatagtgggcaggtaaccccaagagattgcacatctgcactgggcactcttggtacctagatggagagtgggcgagaggtccccattgagtcagcagcaattgcactgcagcactgccagtccagggagtgcaggatggctggcactatgcctctccccacaacattgcagggtgcatgccaagtcctgactctccctgtaccggtgcggaggcctccaccaacatgactctgtcagcaccttgggagtagggtgacattggtggtggagcccaggcaccaggggtgaggtgtaggtgcctgaaaatccctcctggggaggtggtgaggaggcagggccatgggtgagctggggctttagaccccagtgcatgttctgttatcccttcagacttcacttataaaacataaattcaaagataaaaatactaagaatcaactgcagagcacccaactgcaagtggaggccttcagagtacaagggccttaagaatgcaagaccctttggggctccaattctctagagaggagatttggggttcagtttgagacccattagcaaagctggaagatgcagctgtggctcggttgttggagcatgaatggatgggcacagctccattgggtggatggcagtggttccccagtgaagagagtcctggggcttggctaactcaaaagatccttactctgatagtgtgtgctgaataaaacatgagtagtagagagactgagcctcactctcatgtcttttattggaattttggagagggagaccctacttctagcctcggtttatacagctataagataagagcaaaatctacagactcctgggggcagggggttatataaggattttcaagatgcctttgaaaggtactttagcctcctggaaaatggaaatggatctactaaatatcatcaaaatgtgtgtgaccaattgattttgactgtaggactggggagaggagagaatgtatagatgattcttaagaccccttctaacctcaagtttgtgtttctcttattttggtctaagctatagaatttccatgctgtgtattgtgacaaattttaaaagagtattttctttatcatttctccataatataggaataattacttttccttgaaaatatataaaaaagattttttttcctaaggtctccttgaagggagaagacctagaaaggagaagaaaggaaaatccaggccatgatttgaggtttattccataagatatggacaatgtaattttcaaatgattttctaattcaaatgaagaaaatggcaacaaacttagggaccctatagcacttattcttctttaaaatattctgtcttttatcttggcttcttaaaaataaaaaatctttatcactaaaatagccagtatatatattcagtaaatatttattaggcacctactatgttctaggtactataccaggagccaagggtactaactaaaatgagatatggtcctcactcctaaggacctaaaattctaacaaatgaatggtttgaattaatttctgttaactcatgctatcacctggactaggttttcatttctgtccatgcctcagttccccctatcctccccccatgtagataattatagtgatagaacaaaatgatgaaaattgaatcacagaggcgatctctattacctctataggtgcatctcagaaatgtgaaattagggagggttaggaaagttgttttaatagaagcctggaacatcagtgttgacactagatgtgctgagaagaatgacatttaggagcccatgcacagaatgctaaggggacgttctgagaacctcacctggactaggtgaaagggaccaaccaggtggagactgcagggcacaaatgagatttgtgctaagaagcattcaggtggagtggttgccatctgaacacacctccacagaccactcatgtccagctcagctgtcacaagatgtcgatttggtgctgatgtattttcttgctttctgacccagaaagtcttgccatgacccagctgggattcatgaacttggctggaagctaaagaacaggttagggctttgtctttattgcctgtgtgtttcacaattctttgtgaaggaattgcttttttttttcctttaacaaagttggtgtattcctatatggtgtcactgtaactttgatttggtgttctatctgccatcttgaaactacatggtggctgggtgtggtgtctcacacctgtaatcccaacactttgggaggccgaggtgggcagatcacttaaggtcaaaagttcgagaccagcctggccaacatggtgaaaccccgtctctaccaaaaaagtacaaaaattagctgggcatggtggctggtgcctgtaatcccatctacacaggaggctgaggtgggagaattgcgtgaacctgggagacagaggttgcagtgagccaagatcccactactgcactccagcctgggtgacagatcaagactccatctcaaaagaaagaactacctgatgaccagttactttttcaaattaggtcatattttgtaaatcttaataggagtatgaatttggttaatgtgtatccatcacagaaatgggatagtacctttgataaaatgttctattagtacattttataaaggcccattcactactgactctcagcctcccactccttttttgaagaagttgggctgagatagcagctattactattcctaccaccagtgctgattactaaggacataaaatactgtgtgtatgtgtttataatgattaatgtgtttataatgattataatgaagaatgttatggtattgctagtattatgccattttacatatgaggagcttgggactcagggaaattaaatacaaaatcgcacagctagaatgtagctgagctggaacttgaactgatacccaagttctttccactctgctccatatgcttcttttatcattgcagtaggatctagggttttataatggagaaggctaaagaatgcattaggtactttggtaagatacatatcacctttgcagctgcctctcccataatcataggcctgggtaatctaataatatgacatgagtgtaaagacaccagcccgtcattgatctctgagcttctgtgacttgcagaagtcttagggggccaactatagcctttcaagggaagaaaggggtctgggtgggaagacttgctggaaggcagcgaagtggagtggaaagaacatggcttacagacccaggaagaccaggtctgtctgccttgagcagtctcttcactaaccatcagtaaagtgaggacagtagcaccaacttgataggattgaattaaatgagatgaaggatataaatcttatgatgtagacaggacgctcaacaattgttagttgcagttgcaagaggactttactttctctttccacaatttcccatgcacacattcattgacagatgcatattcactgctgcttaagattttgcacgcagtctctttcatgctagtgtgagaagccctaaatttatctttttttttaaaaaaaaatatgttatttctgcatagtttcccattgcctcaatgcttccttttgtgagtttagatcactaagggcctctaggacactgggtgtcaacaatagcgaattcatcccaagtttgtgtcatgcctcttccctcgtctgagggatgagggtggcggttgggtttgcctcttatctcactcgttcttttgctatgggaagtctcactgtcttctccggaagccttaaccttccaagaggaaaaaaggcttcttaaactccgaggcacggctagaacacaagtgcctagaactctgtgcccttgcccactggaagtggaagagggttcatcacttacgctctggagttgtccaaattcttatgttctttgttctcttttggcagaaccagcttcttgcaaaaggactgttctttgtggaggagaagatcaagctgtgtgaaggcaagtacaagacagccctggtagactggggcctctgtgactcagtctttgatgtctggacggctgagatgcttctgtccagaaggggcaggctccaagcgagtgattcaccctgtccgtttcctccctacctaggcagcagcactttgatttgagtcagctgctcacagcagtgcaagtcagaactgtgtttcagaaaaatgtagtgggacggggtggtttctttggagaccttgttcagggtttttttttgttttgtttttgtttttgtttttgtttttgtttttaatgggatgcaggctggtggtcacctttgaaggtataagttatactgtgaatcctccatgctatttcctctggtctgtcccgagctatttcctacaggcctttgtaatatttctggggagtcatagaagagaggagtcctgtccatttgcaggacattaggctaagcaggcactcactcaatagggtatgatttgatagataaagggaaatttcctgatcttagagtttaaagtccaactgacaggaaagaaaggaactgaatggagatagaaacaggttccaaaggcaagaattagccaaccccatgactctaccaagggctactcttagctcccaccaaagtggggcttgatcttagcttgccacctccttcttgggtgacttttggttagttactagtttctccaagtctcagcttttatcatttttgaagtgataaattggggtgaggggttgtagggaatataaggcacatgagtggcataacaccatacctggcacacaggcgaacataccggaccctttcttttttttctgctccagcctaatgaaccgtagatcaaacttacttccagatccagacttattaggtgtcatgtcatcatccttttgtttcttcccattccctgggaaagacacgagtgtgtccaggaaaggggctcctagaaagacaaagtaggaaggaaaatgagaaactgacgctggaaagttccaaggtctggcaaacagttaatgcttaccaagccttgggaagaatagaggttagaaattaacctttgcacatttgagagttggctgaacctgtagccattcttcccttgaatacatcgatgacatttttttttcaaccttataaatacccaataacccaagacctttagaaaaaaaaatttaaattgtggttaaacaaaaccccacacaatataaaatataccctctttataatttcagtactttacagttcagtagtgttaattatatttacattgttgtgtaacagatctctagaactttatcttgcaaaacagaaactccacgtccattgaacaactcccaacattgccccctttcctcagcccccgacagccaccatcttattttttgtttccatgctttgactaatctaggcgtcttataagtggaatcatatggtgtttgtccttttgagactggcttagttttattcagcataaggtcctcaaattcatgttgtagcatgtgacaggattcccttcttattttaaggctaatattccattttatgtgtatgctacattagctttatcctctcatgtgtcaaaggaaggggcttattcttaggtgacttgctttgaccaagaatttagtggctcttttgcttctttttttgagacagagtctcacttctgtggcccaggctggagtacagtggcatgatttcgtctcactgcaacctccacctcccaggttcaagtgattctcatgcctcagcctcttgaatagctgggattacaggcacgtgccaccacgcccagctaatttttgtatatttagtaggcgtttcaccatgttggccaggctggtctcgactcctgacctcaaatgatccaccgccttggcctcccaaagtgctgggattacaggcatgagccactgtgcccagccctcttttgcattttggagtcaggctagtacaaaaatgtggaagacaactgcgtggtaaagggagggaaaggaaacattatccctggccatattaattgtatgtatgttatctggggagttattacaagctcctggaaatgtggaaaaacagctctatgaaaaagaaactgaataaaaccagaggttcaagtgcccttaaaaggggaagttgaatgtctctcacccaagtaaccctcatcatagatacactcagagtgaaaactcagaaatggggctagacaggatgaacaaagttcatccaagattctgtccccctgccctggcatggcctgagagcaccaggcctggcatattctctgagtctcttctagtcttagagttctgggtgttggggcctgttctgtacagtgaataggcatgtggggaacctttaagggactctgccatcttcaaccaggcatctctactttttaattttatgtattagaactccaagaaaaattgtgtttggataaaacttgctataaaacaaagtttgaaaacaattaatatgatccgtccagtcactgaacaaactcctctttgtcgacatctccgcttaggtacttacatgtctatatatacacaccccttctttactgatgcagaaaagacaggtggctgttcatatccacttattgctgttttgtgggcagaagatgccatgttaacttcaacttttccagagccttagtgaccttgagtcttaggaagtttcttatacttacctatatacttctggtgacctaaactgctgcgttacattagagggcagatttataggacggtcacctagaaccatccatccaacccccttcatttttgcagggagctaagtccttgacttatgggctgtttctggaagggaaggcacctgtgttctttaactctttctcccccagggctaccctgttgctgggtctgtgtctgtcagatgttcttctctgaacgctttccaaaacctcccttactctctgaagtttgcagccagcaattagacctgggttctcgggaggcgtcttactgctgctgggttgcagaattaccttgtgtgccaatgagcatcctgtcttggcattgaaagggggagtaagtaggcaccagtgctgacctgcaaggttctctcttcttcccctccttcaggtcaagagggcctctgcttgtcttggttgtagaaggcttaagataagggacatcaacaaagaagctggagtaaccttttgccctttggggtaaattatccaggtgctggagttcaccttggttctaggaaccagggtgactcagattgtgagagggtccttttagacttccccctcctcctccctgcagtgaaacagcatagcctatatttgaaagaggatggtgactgcttcaatcaaatgtttatttgattatctactatgagccagtactttgctaggtgctggggagtcaggaatcagaaaaaccatcacagcattacaggccctcatggagctcacacatgaatcaaatcatcaccaagtataaaactgtacctaggacaagtactaagaatacaatctgcagcggggtggtttgaccaatggggagagactttcccctagaagtgatgttcaagctgcaactagaaagataaacagaagtaggttaggtaaagaagggagagaaagagcagtcaaggcagaagggctagcatatgcaaaggccctgtggcatgacagagaatggtgactgaaagagggatgattagagcccaaaggctgacaggaatacaaaagagaggatcaagacccaggaggaggaggcagattctcctgggctgtgtagatcatattactgatgttttctttatcctaggagcaaaggaaaatgttcatgctaactattaagtcctgttctacactgtcccatatttgggttaaatggtaacctccttccactcaccagccccagtatctgcaaaaatctatacacttggcactttccatccattcacgcaaagattttaaaagattgatttattgaagtggctgcaccatgctaagcactatgatgagcaagacagatggggctccattcccaatcccgttccagtgacgagacagagaagaagtgaataagctgttccgataaagtgtgatcagtggtttgcacaggcaagttgagggtgccctggatttgcattttccccctgtgaatttcaccctgacctttcaaaatctgcacatctttggacctcctggctactagtcatgcccttgttctattctctctccccagccactgcttttattgcccattaaattaatagacgggaggcgccaaatgaatctttcaagatttattcagtggaactggcagtgtcttgccaaacgcgtctctcagtgtctaatcttggctgacccagtttctctgcctgggatgagcagaggcagtgaccaatatcagctctgatatctaggtcattaaacagcaaatgctgtgcaggctcctctttgccagggcccgtctttcctggaggtgcagagttcctcacacagccttctgatggcactgggtgacctgtgtgctctccagcctggggtagcagggacacttggccatagcttaggcttcctgatcctcaaagtgagtagggacagcatcaggaggcaggtgctgtgttttgcagatggccttttcagagaatgctgccttcccagttactgtaaagtgggtggaggaaacagtttccaagttctgtttctgcctctctccattgacagctgaaacccagaataaagccaatatcttaatgagtaagaaaacaaaacagtatatagctgtgcacatgatcttcctggataagattggccaagagcatgggttctggaatcacagctctgccttcgagctgtgtgactttggggcagttagttggcctctctgagcctgtaaagcgggggtattagagtctagtcatgagatatcttataggtaagtaaactagcatagtgctggataatgttgtaacaattcatgtaataacaattactatgtgattttaagatgtcagctcccttttctggattggaggatggaaaggcatatttgcatattttcagttgagttctcccacccagtcctacatttactatagtaaaaccttgtagatcaaatgtaagtaatgagctctctttcctccccacacctaatgctgcgcctcccattcagagtcttactagtgaagactagtaagtttagattacttattagtaagaccagagagttaggatcaatacgtgcacccttgtgagatggaatatatttctgccctgagaatctctgttggtcttagcctggaattaagatcctgtagcaccacacctctgctctctgggctttaatagctcctggctgcaagttttttagcatgtgcagcttgacattttatgtggaactgtcttctggcctctcctacaagtaatgacgaattcttttctttcttcctcccttcccatcttctcgccctcttgtaggtgaaaatcgcattgaggttctggctgaagtctgggaccacttcttcactgagactctccctaccctgcaggcaatattttatccagttcaggttagtctcattggggaacacttcctgccatcctcagcgatctgtcttctctcctggcccttgcggcctgagggctcctggtaaatgggagaaaacttggagattgggcgcttgtattggttaaggagtttagagattgtttaagggctctctggttctatatttagggcctaacttcaagtgaagaagagtgcctgcataactagcaatttgtaggctcttgttaccctcttggttttgagtatgtctttatattcttggagtggtttgtttttcttagttttcagaagtacagaagatgggggaagggagatttcttgtttcttttctttctttctcccctgcctctatctttcttctctccccctacttttttttgtgaagcataattttaaagcaagtttgccgtcacattcaaattatgaaaaaggagtaacattccgtgttcctctgtaagggatcctacgtgatttagtaggaagaatgctcgactaggaatctgtagacttagattcaagagtgtgggcttgggcagagtcatttatcttctgtgagcatagctccattgtatctcctacaaaataaggaatttagaataaaatgtgaatgacacctctagtattcttattctgtggcctctactcctaccatttgtgttgatacccttgcccccttgtctctgtagagctaataccacgatggtcactgccaggttgaagccaccgctaagggaggttgacccatagatgttcctctccaaaatacatgtctctctcacttaagctgcagtgtactccctcttctctcctcccactggggttgaggcttcgtatgtaattaggtattgttgaagtgtgggcgtcgtatgcagaggaacacagccattaagcaatgggtagaatgaccttataccacatagattgtttggtctgaacagtgttttaaaggaattttggattgctgaaaacatttgtcaaatatttaaaacctgggaggttatgcttatagattccattttccatgttagacccaccccataacatttccagtaagatagtacagatagaagcttctgtcctgtagcctgcagaaaccttccccttccttacagtagtcactcatcagccatcagtaagtcttgtctcaggaagataggcatggggataaggttgccagatgaagcaaataaaaatacaggatgttggccgggcacagcactttgggaggctgaggtgggtggatcacttgagcccaggagtttgagaccaggctgggcaacatgatgacaacccatctctattaaaaaaaactagccaggcatggtggcttgtgtctgtagtctcaggtactagggaagctgaagtaggaggatcacttgagcccagacgattgaagctgtagtgagctgagattgcaccactgcactacaacctgggtgacagagcaaaaccctgtctcgaaataaataaatactacgggatgttgagttatatttgaattgcatatataagcaaataatgcaatatttgggacatatttatactgaaaaactcttcaaatttaactgggcatcccgtgttttatctggtagccctactagaaggggtgtgcaggaaagacctgcatttgtaggtggacaaaggggcatgttgaatcagtacctggcgcctcctgcgtttaaaggcaaactgaaccagacccaggacagcaacatggtaccaccatttcgaggggccctgggtctctcttcaggccatttgtgtagggaattccagggtgcaggtgtccagatggttctagaatggagagtgcaggatctgggtggacatagccccagtatagtcaagagggcaaaggttggggaggggggttttaaaagctcagagccaggcaggagcccagacatgtgggtctaaggatagctctgtttcagttctcttggaagatggtaagatctggcaacaattaatattgcccctgttcacctcctcactccccaatgactgacttgaattctgcttctcttctcgagtttgccatggcccccaccttgctggcttcccttttcctgtcaactcctgaggccattcgcatgtgctaaccctgctttattcaattagctgaattgggtttgggtgagatgggcatgtccatattcagattgtggacagggaatattccggggaggtggcgaagatctgcagcaaatggtcatcagaggtatatagcataccctgaaaaaggcaaactgtgccttcctcctcctttttgttctcagctgatccaggttcacatatttatagttttataggactgtatctcttaggctttactttttctttgtgcttagcctagagaaactggatggcatttgggtaacagggatatgcactgttattttttttggagtacgtaggttgtgaggagacaggcttggttttgttatgctttccccatcaagcctaaaacaagaacagaaaagtgaattctggattagtaggaattccttctctgattcattgtgggcctaagagatggctaagtcctggtaacaagccagtgctctggttaatggccccaaatgaccctctaagaaagcaatgattaacttgtttatgtggcaggttggtataaaccgggtaccccataccctcccttaaaagtattttctgcttgcatcaaaggccagattctgcatatagaaaaggcctttatgggttgggaaccagcgaggagttctgaagataaaacctcccccccacctatgctggggaggaatttagatattgagagattgggatattggagccagttctaacataaatggttgtggcatgttgctgtccttggcccggttaaactcacctttaaacacaggaggtactaggtactgattcagtatgccctgctggtcacttataaatccaggccttttcttctgagagtgtaatgtttaaccatgggcttagaagtcccaaaggcaaaatccatcatgttctccaggtgagtgctataactacccatgcccagtctagacccaaatgactacaggtatttcatatgaagaaatgatggcaacagaataatctggggaagaaatgagggagggggagcagcgccaaagaggaacaaagtggttcaaagcatgagctgcagagttagctcatgactgactgtgttagtctgtttgtgttgctataaaggaatacccgagactgggtaatttatagagaaaagaggcttgtttggctcatggttctgtaggctgaacaagaagtgtagttgccagcatctgccccaggtgaggccacagcaagccttcactcatggcagaaggcaacaggggagccagtgtatcacatggcaagaggaagcaagagacagggaggaggtggcagactttttgaaacaactagctctctcatactaatagagtgagaactaatagagtgaaaactcactaaagagtgagagctcactcattaccaaggggagggcaccaagctgttcatgagggatctgtccctatgactctaccttctactaggccccacctccaacattggagatcacatttcaacacgacgtttggaggggacaaatatctaagccatattttctgcccctggtactccaaatctcatgtccttctcacatcgcaaaatacaatcattcctgcccaatagtcccctaaagtcttaatttattccagcatcaactcaatcagaagttcaaagtctcatctgagactcaaggcaagttccttgcacctacgagcttgtaaaatcaagaataagttatttacttataagatacaatggtggcacaggcattgggtacacattcccattccaaaagggagaatttggccaaaagaaagggacagcaggccccacttgagtctgaaacacagcagagcagacattaaatcttaaagctccaaaatagtctttgaccccatgttccacatccaggacatactgatgcaaaggatgggctcccaaggccctgggcagctctgcccctgtggctttgaagggttccagcccctgggtctgctctcacagattggagttgagtgcctgtggtttttccaggctcagggtgcaagccggtggctctacccttcttgggtctagagggcaagaacccccttcccacggctccactaggaagtgtcaggggctccaaccccacatatccccttggcactgccctggtagagtctctttgtgggggctccacccctgtggtaggcttctgcttgggcacccaggcttttctatacatcttctgaaatctaggtggaagctgcaaagcctccttctcttgtactctgtgcacctgtagacttagcactatgtggaagccaccaaggcttatagcttgctccctccagagtaacagctggaatggtacctggggcactttgagccactgctggagccagagaaactgggatgtgggcagcagtgtcctgaggtagcactaggcatcccctgagcgtggcctccaaaaccattatttcctttaggcttctgggcctgtaatgggagggactgtcccagaggtttctgaaatgacttcaatgccttttttaaactctggtcttggctatcagcacctgtttcccttttagtcatgcaaatctctctaggaagtgattgttccacagctctcttatatttctctcctgcaaatgccttttccttcttcactgcatggccaggctgcaaattttccaaatttttatgctctgttttccttttaattataagttccaactttaagtcattcctttacacctattcctgatcttaggctgttcgaagcagccatgccacatcttgaatgctttgtttcttataatttttttttttttcgagacagagtctcactctgtcacccaggctagagtgcagtggcacaatctcagctcactacaacctccacctcctgggttcaagctattctcctgcctcagcctcccaagtagctgggattacaggcgcctgccaccatgccagtctaatttttgtatttttagtagagatggggtttcaccatattggctaggctggtctcaaactcctgaccttgtgatccacccgccttggccttccaaagtgctgggattacaagtgtgagctactgtgcccgccctagaaatttattttaccagatactctaagtcatcactcttaagttcaacctcccacaaatcccccgggcatggacacaatacagacaaattatttgctaaggcataaaaagggtgatttttattccagttcccaataactgcctcatttccacttgagaccacctcagcctggcctttgctgtccctatttctatcagtattttagttattaccatttaactagtctcaaagaaggtccaaaccttcccttgtctttttgtcatcttttgagccctgagccctccaaactcttccaacctctgctcattacccagttccagagctgcttccacaccttcaggtatcttcatagcaacattctactccttagcaccaattttctgtattagttcattttgcattgttacaacggaatacctgagactgggtaatttatttatttaaaaaaacaaggtttattatttggcttacagtcctgcaggctgtatatgaaacacagtaccagcatctgctcctggtgaggcttcaggaagcttataaccgtggcagaaaggtgatggggagccggtgtatcacatgatgagagaaggaagcaagagatgggggaagaggcaccaggctcttttaaacaactagctctcatgtgaattaattgagaactcacttatcaccaaggggagggcacctaagccattcatgagggatccgctctcatgacccaaacacctcctgctaggccccacctataacactggagaaaacatttcaacatgagatttggaggggacaaatatccaaaccatgtcactgacctgggttcacattgtcagtctgccacttatcatcttgatattcttgggaagataactttgcttctctgagccttggttttcttctagaaaataataaaacttgcttcacaggagtgttaagaagagtaagtgagataatacttgaaaagcacttaattttgcatatgacacacagtaagggcttaagaattgtcgccatcatcatcaatatcattattattctctgcacaataaaatgtgttggaatcacagcagataatccagttatttggatgagtttttcccacgtcatgggctgagcagatgagttgacaatgggtgactgttgagtgtctaccatatactggcactgttatggaagtgtgggcacagctcctgagagttgcctaagtggggttatgacctgtattttcctagtcatcctacttaggaaatcatccccccagttggtgtaagacagtaggctctcttatacactgttgctgggagtacaaatggatgcaatctttttggagagcaacatggcagtatttttttacgactttttaaaggcatatttggattgagtaattttcctttgcaggagaataatctggatatgctgataaaatatgcccaacgtggcatggataaatatgtttgaaacacacacacacacgtgtgcaaatgaaagcatcttggtcaggagatggttggttacacacagtgtgttcacacagtggtagaatattacgcagccttacaagtgagggaggtcaatatgtgctggtatgaaaagatgtccaaaatatacaaagtgaaacaaaagcaagctgcagaacagtaggaggggtataatctctgtgtgggtttaaaggttttatatgtgattttgtggatataggaactttctggagaaattcagaatataaataaaaacctcaaggagcagttaccagtgtggagtgagaataagagattagacgaagaggacttgtaactttaccttaagccctttttctgatctgttttaatctttgcctttaaatgttttataatataaatacaaaaccaaaaacaataaggcaaaataatcgtctatttggagtgcagttcaggggaatgaagagtccttcgggatgccttgatgaccttctagggaattcctaaataatcagttctggaaagtgatttggcagttgttggagcaggaggtcctagaattgtttccttttgctttgcagtctttccttcccaccagaattgctgttctagtttctagaaggttgcctgccccagtcttcctttttctctcttcccacattctatagtttaaatcagacagttctattgttcacttccctggaaggttgtgaacaaaaagttgtttatgtcccctctgcttccagcatcacaaaggaccaagagccaggacctggccagaataatgctgcctaatgctggctctctcctgttgcctcagcatctctgtccatcaatccatccaacagaggtagtaccaactggccaacttttaaaagatattgaaggaataaaacccagtcaaagtctctcattataagataacttatttaaagcacccaacataatgtgagctctatttataattttttatggtattgaaatgtatgggtggtgattgtgtgtatctgttggatgtggggggtcaggggatatggagatagcaaaaccactcttgaccatgtttctataaaactctatggagttgcaggaaatataaaacatccttaaaccttggtcagcttgggagggtaccctaatgatgtctttggttctaccaggaacaaccggcttttagtgtgcatttgtatgtatgtgtgcaaaggagagtctgaaaaattcaccctcttttctcttttgttcttgaaaaacttgagctctaaaatcaagaagtttgggtttgaaaccctgctctactttgggtgtattatagtaagtctctgggttttcaggtgtttcatctgtgaaatgggtttggctctaccaagaacaactgatttttagtgcatgttgtatgtattgtgtaaaggagactgaaaagtgcaccttcctttctcttttggtcttgggaaacttgagcagctctaaaatcaagaagtttgggtttgaaacgcagctgtactttggttgaattagagtaactctctgggtttttgggtgtttcatctgtgaaatgggttttataatggtacctatctcaaagggtggttgtggggattacacaggttgacatctaaactatgtagaatcatgcctagcacatagaatttaatacatgttagcttatttatagttattattttcaccttctgctccctaccccatccccacaattgaacaaatcccttttctcctactttcctatttatttttcttcctaaattacagtatttatacaacaatctaagaggtcctgtgttttccttctttatttgtatgatagatgttcagatatattatagatgaagttgagaaaacggccttgaatgtagggaggtagtattgatcttctctttgtttctcccatctttctctttctctccttcgtgaccactcatagcacttataatagtgtggccctgattatatgtgccttgtattgtctttcggtcatttaggtaggcaggttgagtcatgccttatcttaacagcattttaattctagaggagccaggtctttggctctttgaaagacacactggcccttgcagacgcctcatcccatctttggtgctatataaacatgtgttgtcttgaaccccacatggtcggtggcagattcagtaagctctcacctcccggccctctctcctctgtcccctctagggccaggagctgactatccgccagatctccctgctgggcttccgagacctagtcttgctgaaggtgaagctgggtgacctgctgctgctggcccagtccaagctgccctcgtccattgtccagatgttgctcatcctgcaggtgaggctgtgctggagacttgccccaaggcagagggagggagcgagggaagagattgcctttctgagatgagggggaaggaacctagtgaccagagcaccttagcttggcttactactatttagtttgttggcccgtgttcattcattcattcatttgttcatttgaggtgcattcactgagcacctgttaggtcctggtgctgtgcttggtgccaggaccacactggggagtgagggaagcatagtctttcattcaggaagtagatgcccttttcccctctccagtgatgccagggagccacaagttgcaagtcacagcaaagaatacactttggcctagcttaagcagatgaggaactccctgaaaagctcctagggcagatggacttcaggagggattacaaccaggaatgaggctgtctcaggccatgaagccaccatcctttctctactttctagtctctacttgtatctgggctactttgtctgtcttcatcttatcctatctttcctggacttggtctttttctccctgcaggcttatgttctgtgtttggtttgtacctgatcgaatgtgacacctcacagctgatgtgcttccagtaagagactgcccagtggctgcctagtgtcactcaatcccaattctaaatcaatactaggaatttgagctaacacatattggtccttggctatgtgccgggcacaggccaaggacgttaagtgtgttgtttccttaatcagataatccagacaatcactgtatgaagtaggcattgttattcccattttagaggtgaggaaaatgaaacctagtaagtttgtgtgcttgcctgaggtccctcagttaggaagaggcagtaagatttggaattatgcacactgtgcttcctccccagaggaaataatttaattggtccagcttgggctagatgattcctctttgcccaatcagccatgacccttgaataagatcaagcagtataaacatggccttggcaaactcattcctatgggtgggggcacacaattctcgacgagtagggtttttggctagggacacccccaagaggtgactactatgcctcttcacctctgtaacaagttcagatgctgcagcattagctctgagcccttcctcagggaagatggcttcatccttgatcaggctagtgatgaccccttgctgccctcacagcagtgatggaatgtcaggcattggggccccaatccttcccccacatcccccagctggtgctctctttcagtccttgaagctgggccatccttctgggcattctccccctttcctgtaattagagaggaggaagagttgcctaataggatgagggtgggtgtaattggccggaatgccaggtcaagtatttttatggaagagatggagaaggagggggatagaaaaatgcatgtggggctcgggtctgagaagccttaattagagcatgcttcctgaataaggagtcttgaaaatgagccctttgggattctgataggaaaattcggaaagttgggctcccatcttcccatatcagtttataatagtttagggctgagaagcgattcctttgtgttttgggcggtggcggtttgtttggttttgtgggaaggagaattgatccagtcctgcaggtgaagactctcacctgttgctgctggaacaggagggcctgtgtctatcacattccaacattccgggccctgtgccaggtagccctgcagccatatgagaaagctgtcatcatacccctgagtccccaaagacaggtgagactgcttgcccaggagaatctaccctcatgcgctctggtccccacccccatttgctctccatgggacggcctcaaactcttcagtggtttccaatcgatcttagaaaaacagcccaagtctgtaccctggccttcagcatctcccacccttccatccctgcctggaacctgacttactcacttttctggtcttcttggcttctcctggctgccgtgggatctttgtgatcaccattcctcctgctcagaacactttgtcttctggggtcctcaagcccctgtctaatcaaggcaggtcaatgttttctccttgcccttgtgccctcagcacccagcatagtctttggcacataataggtattaattaaacactgtccagggaatatagcaccagctagtagaaggttgagcaggactgatgctgggtccctgacctcacacccatgttggtgaccgtcatgtagggcttcttctcttggcagagggaagtacagtcaaagaagctctgggatcatggcgaatttccagaaagtcaggcaaggaaatggttcctcctgtgtctataccattatttttcccatctcacagctgagatggaggttcagagaaggtggcgacttttctcaaggtcttgtactcatttattaagagagctggattgctccccatcccttagcccttatcttcctacctccacttagcctttctaggcaactactgcctcccttctgcagtctcccagggtacttggaaacgccccacaggcatcctacagaccattaaagatcgtccctctctcctgcagggcatctggcatcacttcccctgagggcttcctgggaatgttgcctttggcccatgttcttccttgccaggagctctagagcctggggctggggatgtgactgtgaagaacccggatctttccccggcccaagtccatcttgagcagcaagggcgatggcctctggatctgaatggaacttccaggtggcactgccctggggccatatctgctacaggaaatttgggcctccgtacttagaattgtccattctctccctagacatgcactttccacagtgccatgagacctggggctgatatttttcaaaactacctgaccctactacagagaaaagagctctttcttaggccttcagctccgtcttttctgtcgctcttccacaatgtccctgacccaactccacccttcccaagttgtacaaatactcctacagtgggccatgtgctctgccttcaaactgccccagtgagaggcagaatcggagatattgaccactgtgaagatctgtttcctcccagctgatgcagacaggtcctgagaccaccggaatggtgcattctcaggggccccagccaggcagggtgtgcagcctgtactcagaggaccctgagcttggttttattttctcccatcagcatttgacactcttaatgatttttgaacacgaggccctgcattttcattttacgctggaccacacaaattccatagctgtttggcagccaagccaagggctgaggacagcaccttcctagagggctgtgcacaagccaagttctcagcagcaacttttctgagagaaaaccatctagctccaaatcacgtgttcattatccattttcttcccaccttttgccacttctcctttttctgtggtccctccctgtttagcaggtatggaaggtttgggggagaagccactcattttctctgcatctcttctggccctgtttctacctccaaatctgcaccatagccccatcctcagcttccttgtatttcctgaagctgtgtcctctctcccccagcccctggccgcacccatctcagtgtaatggtaccataaaggggccaaggaagagcctgtttccttggcagcttacatctccccctgggattgccaacatgcaggagtcagcccttcctgcctcattacctgaacagcttccccttcaatccctgaaacactgcactggagtggagtctactttgaaagtgaaagtgatttagagtctactccatttcgagaatttgcatgttaaccccttgggctgggcacagccccatggagatttgtttctttcctggccagtcccctctcctgccaggtggtctttgcttctttgcagcccctcaacatgacagcatgtttgagtcctttccagcaagaagctgaactccccaggagtctgccagttttctagaaaacattggttactggctcctttctggttttgaccattctttactcagggcttagctctgaggactcctgtcatgccggggtttttaattggctcttcatcttggcgctaaaactattcctggctcaaaaagaattatccctttctcttatagccctgaacttttccatattctttcctctcttcttttctagcctgttagcaagtggcagaagaggggatcagagccagatagcctgggttccagttcagggtttttgccatttactggctgtgtttttctgctcaaggtatttaagctctctgggtctttagttcttcatccacagaagggggataataagagcaccttcctctttgcattgtcaggagacctccgtgcattaatatatgttaaatgtctctgtgctgtttatgaaccagtcacgatgacagtatgggtaggattattgtctttgagaccagccagatctcagccttggaggtgggacacccacactgcattggtggcccagtgggagaggctgctgtggtactaaccatgcacagttctaattgcagtgacccatgacaagtgactaaggcttcaggcctcagtttccttcatcctaactgcaaggatgctgcctgccagcaacacagccttgtacattggaggaggacaatcaggatttgttgagtgagaacctgctggtcatggcaatgaacactgacctttgtgtatcttggctgttcattttccagagtgttcacgagcccacaggcccaagtgagagttatttgcaactggaggagctggtgaagcaagtggtttctcctttcctcggcatcagcggggaccgtagcttctcaggccccacgtacacgctgggtaaggagtgcagctctcaagttgtcaagaggcccagtgatcatgataccagcactgtttaactgagcactgtttaactgagcactgataccagcactgtttaactgagcacagccttttgcttcctgtgcgggtcagtgcaaatccgtgcatcttaagcactcacattcctggcctctggaggttgcagtaaccttctcccccttgatgattcctccccaaggaccgatactgtgcctttgcggtggtgcttgtctgatccacatctttgatcagtggctttgatcattttggtgcgcctaggacattaatctttctgtatctgacaccagaaactgtgctttgttacaccctccctctggttgagtagagaaacctcctgagatagatttccctttgaaaccaactggaaatgtcaggccaacttgtatgcatggccagatgttatcgagttgctgtctcccactccatttctgtaggtaccaccacatggcaaggaaaggggctcttgcatttggggacaaatcctgttggggcctttttttgatggctgtaaacctagcatcagtgagtgtcaggctctgtaccaggcaccatggaaaatctggagatgaatcagatctgttccttctctcagtgacactgcagtctagatgggttcagtacaaatatctctataatacaaaatagctctcagaccagtctttgtagaaatagctgtatgataaggcttccaataattataataataaaaaacccagttattgtctgaaatataaacgctcaaaatgcagaaatgttttattcattgttctgtccccaggaatggtgcctggcgtatagtaggcactcaaaaaatgttagatgatggcagcaacggtacttcagggccaggggagccagcacccatggagagatgcagaggcagaaatggattactcaaattgggaacctgatgccccctcttctcactttaatggagttgtaatagttgagcttcaaagaaaggagcgtcctccagtgaggttcctgccccttcctgggcctctctaccacagcaagagccagggccagctggcagttttcaccaccctgctcatgtttttctggagacaccagcttaaccacagccaccacagatcggagggtgctggccccagcctgctgcctgctggttcttctccttcctccctcccttcctcactcattcctcccaggagctggaatgggccagagtttcaatgacactgaaggaaaacagtcttctgcagccccactctgagctggggtgccatgttgctgcggtctccctggagtccaccttcctgctggctcagctcactgaattttgggggactggggcatccagggagctgtcaggacgtcagcaggttagctgggccatggcaggaacgctaccattgtttgggcctaatgccagtgtagaggaagaaaaacagtttttcttccaactctcctaagctcttagttggaacagaaccctgtaacacattaacaggagaaaaacaaacagcagcttattaaaactgtatgtttcatacatacatgggtcacacccagggagtcagtagttcttaaatacatggctttgaattccagcttatatagcatcttcaacaacaaaaaataaatttctagagaagtgataaggcaaagaaaaacaactttgagtcttcaggggtggcagcttgtggcaagggaaatagatggcagataagggctggttagtgaggcttgttcatgtaggtttctctgttggcattgctggctgataagggtctaaaattgtcttcagtggttaacctttgctctccctggtagaagtgggatgggataccgtttgtctttatacatctatatcctgcctttaagcaaatagagggaggacagagagcttcctgtatctgcttcttaactgccttcagttcataaatccttatgcccaagaggcatattttgtggtggcatattttggtgtcctatcccaggaacaagagtcaattgggaagtttgttcagtgaggactcactctaagaggggatagctttagctttctagctaaaataagaataatgcacacttttgccaaattataaagcaaagactcaaggttttattcttgtacctaggacagtccctgcctctagagagttgtcgcactaggggcggggagggaaggatgtgaccctcttttggttaattttaaattatcatttcagcaaatgtgtactaagaccctgtcctggcacactgggaggtgctatagctatatctgtaaatgaagccaacccatccctgccctccagagcacacagcccagggaagaagtcacaaacaaggcagtgtctcatcagtgtacacatgttctgagggggaaagtacaggggccacgggtcccagggcacagggatttcatcttgactagggaatcagggaagactacctggaggaagtaatgatgtctgtgatgggacctgcaggatgaatataagttagctgagtaaacagagagggatgactatccccaggccaaggggaggagcttgggagggtttggaggacaggaggtgagcaagaggaaggagcgttagaggaactgaaagggcttcagagttgcaaggaagctgatggcaaggggagctactggacacagacctcgtcctgggtatggtgctgggggtgctggatgctggaccatggagcagacactgctgttcccaggtttacaggggaagcaagtgaggattaaggtaacatggagccaggattccaatgcctcaagctgtggatactttatcagctgccccacatgctctaccgccacccccacccccactgaccgctgctaactttgaggaggtgactttattaggggacagcccaggaggtgttccttagcccaagagggatcctaagccagacatttcaccccatgtctctggatactaagaagctaaaatggtcacagcagtgcccatcctgactgaggacactgctttccagataaagagaggtctctcagggcctccgtctaccccttagtaaaaggtttattttgcctgtgggaggagagcattgagatcgctggctgaagtaaaaactaaggagttgggttgggggtgataaacccctttacctatgggagggctttgccgtggctcacttgggccggaggataggtaggcgtggtcgtaggcagcggagggtgtgggggccactcatcccttcagaagccaccactcacgctggattactgaccagggttttggcgcgtaactcattccatcctccaaggtactgttgtgctttcagtctccaggtcacccgcagggtaggtgaccagagccagagaagcggtttattcccggggctccgcactgcacccacgcgcccgcgcctgtgtttgactgcacgaggattctccggaggtgtcccttcctgccagccaggcctcacccctgggtacgcataggtcagaggcccacgatgagagtgagagagaacgtgccgctctctccaaagcagccacttttctgcaacagtgggagttgctgagggaggaggaagaggatagtgaaacttttttttaaaaggccgactcctcagaggctggcctttgccccatctttcaagtccccgaagtctccaggctgtttccctgatgtttgcagggccctcccgagcacacactcagcagcacgctcgacttctcccacacaaaggccctggcctcccacaggcctccctccattgtgtctgcctgggggagggcccttctccttcaggatactgtagcttctctgcgtgacaagccagcattcacggctttcaggtgccagcctggagagggacacccaccacgggcttggtgtgctggggtcacaatggccttattatggcggtcgctccggtggggcctggccagggagcctgggagatcaaaagcctgggaaccaagtccccaacaaaggacccgaggacggccttatccaggctttgcatctctctgggggtttgaaaggagctgctcttgctggctccggtgcaggggatgaatgccagtgaatgccagtgttcagcagggctcctggtgagtgaggagggaataaagcctccccttggcctcaccccgtgtgaaagggaagaggaggaggcagaggtggcctggagatgccagctgaaatggcaggacccggccctcttcccgctaaaagggcaccactgcaagggaagggctggtttggagccccagggggtacccacagggtaatcagtcccttagtgggagattcccttccctgggtgacagggccctgccttcccgggagcagagaagaaaaagattggggaggagaacaagaagcaagagtgtcggtcgctgtctgccagccccgggcctggcgttcagttttaaggcctcccaaggggcccagcaggcctgacctcccagtggggacacagctgacgcacttgtctgaggcttggctctggagtctggcgggaacttagcaaggaaacgctgtctgcccgggggactcaacacagccttgcggtccctgtggtcctggctctgcccacacccaatcttgggaatgaaaacattccacccagaaagtagaaggaagagctgtagcctctcctgtgagtcatcagcagggggagagaggctgaggcagctgtggagagagcagggccttggaaaccacgagagctggggctcagctgtgtggcctggagcaacttctgagccacagagggctgagcacagaggccctgtccttccattcaggatcagcaggaggaagaagctgccctgtctcaggtaagggccaggtagagctgcctgctatgttatggacgcccagctaaaggtggcctggcgtccgtggaatcactccccggggaggttgtgtgtacctccccaatccctcccctggatcccaaaccacatccttggccttgccttgctgtattgccatgtcctatttctcagcctctcccttacactgagcttgctcgttgagagcagggattttgtatcccaggacctggcacagacctctcctgtgagtgagtggttcagtctgtaagtcaagcctagagaagcacagcccatctgaaataggctttgtgacttctcttccttctcctctgaatttccagggtgctgtcgtctctatctctgacctgacatttgccacactgacctgttctaacagttatttgtgtatgtgggtcacaagctgggcctgtgctgtcagctctgggtttgagtcctggtttcatcactaactatgactgttgttattccacatctcaacttcaggttcttctgcgaagtggttagaagccatcagtggagcacctcctttttggtacagtacctagcatatcatggatgcttagtaaatagttcctcctaagaactcgtgcccctgacatgtgaacatacatgcatggaggtacacaagtgtgctgggctcaagcccctgttgggggccccacatcagatttatgtttcttttcttctctgcagctagtgcagcattttgcatgtacaggtagtagtgtttgttgaaggtggggacaggtggtgttgtggtctcctcctccagggcagcccccctctggctccagctcttggcctgtgagcagccagagtggcttctcttgtccatttgctgcctgggccctccaaggatcactggagacacctttccctggctcatcccagtgggctgggacctgcggaaatcatctgacgaattctcatttcctacaaagatgctgcatgtgtctgccaagcaagttgatttcctgttctctcgatttaccctctgtcttctctggtcccagcctttcttccaagtttcagccatgttataaaatctaacattaatactgtatctttccagataccccttccccaaagagaggagtctcccatactcttataaaacattatcgaggccgggcacagtggctcatgcctgtaatcccagcactttgggaggccaaggcaggcagatcatgaggtcaggaattcgagaccatcctggctaacacggtgaaaccctgtctctgctaaaaatacaaaaaattagctgggtgtggtggtgggcacctgtagtcccagctactctggaggctgaggcaggagaatggcgtgaacccagtaggcagcgcttgtagtgagccaagttcgcgccactgcactccagcctgggcaacagagtgagactccgtctcaaaaaaaaaaaaaacaaaacaaaaaacaaaacaaaacatcgaaatctctagcaacattagaaataatgtcactactgtctacctctttgaccctcccctttgcacaaacccctcctggcaggtaggtacccagtctcagaggcccagacatctgcatgaagcaaatgctccctaaacaggtctcgtcctgtctcctgctagactggttgtagggttcaggtccccacatgggtttcccaacagcaatctgaagtgtgtacttctatcagcagtgagagagaaatgaattgttctcaagggcattttttttaaggacagtttttcaatgggatccttgctgctctgaactcttctggtgcttctgttttatagttattgattttggagatcataaaagtaatacaggtattataagaatgtgggaacattatagaaatgtgtaacttggagagtacgagcatccatgcttcagaaagaaccgctgccaatgcctggtgtattcttggttgctccttggcgttttgtctcttatctccaaagaggggcgccagtgtcagcttcttgtgtagcatctgctggggggcagtgtttgctattacttgacttcagtgggtgggctgcttcaaggaacatgtcttctgagggcagcagcagtcacctgagacacagcagcgtgtagtggggaaagtctgggcactgccatctagaacccaagagaaacggggctgagcctcagtcttcctcatctgtgcagtgggcatactaagaacaactctgttttggagggagattgggactaaacagcgagatcatgggtgggaacacactctacactctaaattctatgtaatatcctttgattttgaaaaattgttattgtcaccaccaaataggccccttgggcttctgagccagtagactcaagatttagtccaaaggtttagaatttcattctcttcattatttatacacacacacaacagtccgatgacgggagctgctgtgagctttgcagatggatgtaggcaggtcttgctgtgatctccttccaggagcattggctctagaagtggctgacacacgtgtctagggccctccagatccactggaagagcagagagtaaactaaagcagcatgagccacgtgtccccatgggccagtctgtgaacagcatggtttgctttcctcttggaaagtggggtgttccccctcctgtccaagtgtggtggaaatactgataccattgggccccactccctttctccccacagcattgtcctgcctggctggcagagggaacacctttctcttgggtcttcagggtgtcagagatatgggcactgtggaaggcagagacaggtgaaatggtgtatgtgactgggaagctgggaagaggtgtgctctggcagaaaaggaggctgaaaagaagaggaggcccagaacagaatccacccatcccccagccctttgaagctgtgtttctcccatggccgtgccttcaaatttactctctcccaggccagaccggttgcagtggctggaccatcccacgcctctgcctctctcaggtccagagccgctcagctcgtgacatgataccaggcctaggtggcagaggaggcagcactgcctcaagaggagcatgagttgggggacttctctgggaccaagggacccagccttgtcatggtgcttactctattccaaactctgtgcatgtttctgccctagcgcagcccatgtgaaggtgggagagcagaggccctgggagctggggtgctgctgtcagatttgcttcctctcttgggactctactcccgaggcttcagttatctgagttttttggttcttctcctgcctctctgacccaccctagggtttccttccttctggaaaggcaatggggcttacccggtttttggaggctgccatctgtgctccagtcccagctttgcctcttctttgcaatgttgaacaagttatttaacctctctgtgctttagtttccccatctgtaaggtggcagtggtgatagcagtacccagctcattgggttgagaggatttaattattcacagatacaagatgctcagatcagcaccgaacattcttaagtgctatcctgtgtgttagctgttaatactttagcccctctgaaagtggtgctgttagcccctctcattttatccacccagcataggtgtacacacgggaataatgtagtcctttaccccatcttcattttcagagaggtcacatttactcggagggccccagccattactaagttccagaggactttgatttttcatatcctaaaatgttttcttcttgtcgtaaaatgcccacatagggaatgaaaattttaaagacgtatcaataaaaagataatgaaattttaaaaatcaccgggtaatacctttgcccagagatgataactagatattttgatgtagcatttcccagtttttatacacaggtgtggtgggtgagtacaacacccagtataaccccagttttgcttaaaaagggacaaaatgcatataatactgttgtttatattctgcttttgtcaccaaatattatcaacatttctcactgtccttaaatattatttgaaaatgaccaaatttctgtctttagatagaaacttcttttcccagctcaaaactgcatgtctgtcagccggtggaggttgccccttcagcatctcagacgcgatgtggccaggacccggcgctgggtctcacaagctgcctcctctgcatcctccccatccttcgcccctcccccaagtctgccgttcctttgttctgtcccacagctcctcctccctgccccgctcccatgatctcttagttgtggggttctgtagtatctctgtagtatctctgtggtgtctctagcggtcatcctcaccttactgtcatcaccacaactccacttcctttcctgatcacctctcactttgacactgatgttagcattaccttttttcacatgcgatccctatttattatggaatataatacctgagccttctccctggctttcctcgctgctggcctcgctggctccagcccattctgccacacttctgcccaaggaagcttcctgagcacagtccatcttgccctatgaccttcgatgttaactgcgtccccgcagctgtgctgtgacctggtaccacaggtgcttccatctgcctgccggggcacctctcctggagtctgttccagccaggctgtgacctgatggtgcacctgtctcagcagctttctcaggctgctgccattgctcagaactctgtcacccctttaccgcttctgggagttctgccatcctaaaggtccatctccagtgtacatcctccaggcaagtttcctatctccagatgggcatgctttttctggcccttgaagcccctccacttggctcatccttcccttaaggtatttcacctaccctagttatctgtgggccttggatgggcagctagaagagcaagggtctggagagagacagaccttgtttgagtcccagcttaaactaccttctatctatatgaccttgggtaagctattccctctctgagactcagttttctcatctggaaagtggaaactgatacaataccatgacttaggttcagttttgggggggattcaaaagataaaatgtctaggtttagcacagtttttggaacatgatgagaattcaaaagcagcagtttaggccggacgtggtggctcacacctttaatcccagcactttgggaggctgaggcgggtggatcacctgaggtcaggagttcaggaccaccctggccaacatggtgaaaccccgtctctagtaaaaatacaaaaattagctgggcatggtggtgggcgcctgtagtcccagcaactcaggaggctgaggtgggagaatcacttgaacctgggaagcggaggttgcagtgagctgagatcacaccactgcactccagcctgggtaacaagagcaaaactgtctcaaaaaaaaaacaaaaagcagcagttttataattagtatccagccttcctgtgtctgcctccttggggtgatccatggaacctagcctgttctttgatgatgctaaaggctgtttgagtccaggagaattgacttgaacagaacataggtctgagacccttcacctggcaggagatgagggccattgatagtcgtggttctgtatgatttgcaagatagtcctgctaccttgggtttgacaactgaggtaactccccagttatctcttcctctggatttcagcttaggaagactcttttatatcacctgttggcatgggagaggccactcctgcaggaagccagggtgcttcttttggaatgctcaggtcctcagaggacattgattgaaagggaattttagggcaaacccaatgaagctcaggcagcagctgaaaaacacaccagattcccttgactcttatctgtcaaggaaagtctgttggtgaccacctaatatgtggggtagggttggttacaggcaggatctggcataaacaggtaaagttgcaagagaaacatttaggtatcaccagattcctcccttgcattgtggcagggctgcacctaagagctgctcctaaaggttgagcaccttgttcttttcccccagttggattaggagcttttaagcaccaataccccctccccaataacagtctttgctgatttttctcttgcagccaggcggcactccagggtccggcccaaggtgactgtcctgaactatgcctccccgataaccgcagtcagccggccactgaatgagatggtcttgaccccactgacagagcaggagggggaagcctacctggagaagtgtggcagcgtgcggcggcacacggtggccaatgcccactcggacatccagctgctggccatggccaccatgatgcactcgggcctgggggaggaggccagcagtgagaacaagtgcctgctcctgccacccagcttccccccgccccaccggcagtgctccagtgagcccaacatcactgacaaccctgacggactggaggagggggccaggggcagccaggagggctcggagctgaactgtgcttccctcagctgagtcgccacccctgggcctttccatctcctgttttgcaaccaggatgaggacccctccatctccgtggattactgaggggggctcttgctttatgcgatgctgccttatttcctttagggtactgtcctggtcaaaatgacctaaggggaaaccgttgttgtaaacctctttattttggtgactgtgaccacttctttgtagccaccaattgtagtgaccagttgcctaatggtcactttctgactccagccttgccagcctgactcagatcctcatctctgggcctttctccctccgatgttggactgcctgatgctcccaatgacatatccaatgctcctggcatttctggagcaggaggttgtcaggacaacacatataaccaccaaggatgtgttggcctttggagttcccctttaggttcctagtgatgtggaggtttatgggtgaaaaattagtggagagggaactcctctcccccattttgtgtagagtgaaaatagcctgaagcccctactcagcagggctctgggaatgtgccttccttattttagtttcagaattgctgggaaagttaccccactggtgggtgaggatctatcctcaacctacatccagatcctatgtgctgcttgcacagaggcctttggcttttgacccaggagggccgcgaggctggagctgccctgtctttcattgagccttagcatttccctctcaggcttcctctcaagctcaaggaactcacccccagataagaagctggtgcctcttgtctctctcatttcagaaacggactttctcatcatgctttcctatggtgggtatgaggggccagctgataccaaccaactggcctgtatctatctatctggatttgacttgaatttttaaaatgtgtatcgtttaaaaaaaaaaatgtttgcaaattttgcacataggatcttgcactgttcattttcagtggggtgagtcttcacactaaaaacacaagcagagctcctgggaaaagagactggaagtggttcaggataaagagatccatggtgggcagggctgttaggtcacagagctctagaagcagctggacttgaacccacaatggcttgtgtaaattcgtaaatttcatggtttctaggaaaagctgcattggggtggggagacccagtttgcctcataggcagaggattctccaggaagcatggaaaatggaatgtttccatgctttacagtgctgggagagaggggagatgtgggcaggaccttttggaaggatgtttattctctgtggttaaagaaatgctgagaatttctagcatgtgaagcacttgggggcagcaggccttggcacggtgctgcatccttctactgctccctccaggtctgggggcttttatccaccttgaatccctatcctcctctttgtagttgtcggtctcactgataacagctccagaaaaaaagacaaggctccccctctgacccttcctgttggtatttatgaaatctcaaagagatgagccaccttggcttccaatatggcaagagggtgctgggagaaggtgaagatcagtctaagctgccacggtgatgagaccttctcattatgtaactcttgatggcatttcccttctgagtgaagatttgaaatatgattgattagaattgtgctcttgatggctgggaatttagaaattttattttaagagttatttcattttcatcctaagagtgatgggagagaaatgtccaaaagagatctgctgatctgctgagagtttcaaacaaacaaaaaaataatctctatgtatgtgttggataaagtctacagactgactaacatgcattagcaaatggagcatcagtaggtagcaacatgataatttatgtaactgatagcttctgtccttattagtacacttaacatttgagactagtatttattgatccaggcaaagtaattaattaatcatgcttgggcttactttttcagtttgtaaggttaagcatatgtgcatgcgtgcgtgtgtatataaatgccttttccatatcttaaatgtccctgatgaggagagcagtcatcaattaaatatataagctcttaaaatgagaatggaagtgtcagtatagacccagtgtacttaagtgctgatgactgttagccagtttacaactttttaccatcgatgtacacatttgatatttgtgcagtaaatagactgtacctataaaaaattttattgatgtttatggtcatgttagctatcagagagctattggagtgagagctgaggtgtccttaaccactttttctctcctagattcattttcattatttatgctaggattttcttatggttgacatttgatgacaggaagcaatcatgactcttcaagtgagctcacagaaacctttcatgttgtctgtttccaaaatggattcaataaacaacattttgtccatgtta

SEQ ID NO: 30 - DNA, 19768 bp, Homo sapiens
ccccagtctgagaacaagaaagaagaacttctgtctcgaggtaaaaaggcctgctggggacctggggtccaggtgaagggatgggatggttgacagaactgctcaggtgaggacaggcttctcatgaggtccctgagaaacttgccttttggagggaaatgtcctctgccctctggagcctggggagaaggttatttctgcccgccagaccagcatgctcgcttttcttccatgggcattcaggaatcctggccccattctgacattcctcaaatggaggaattcctcaaattaccagaggaaagttaccaaagtttagatctgctggagctcttcaaggattggcctgagacaagccgggaggtgccacggggcttggagctggccctgtgaggcacctccgggggaagttcatgtcctaggtggttcacgtcatggacctcttggaggtccgtgaatagatttattcatgggatttgtgaattggggggaaaaatacatctttattttcactaatctttaattgaaagtcagcacttgcttcagttatgaatgtagacaatgaaccacaatagaatttgccatcaatagaaaacacaaatattttcaaatctcattacagtttttatagatttctccaaatgtccttaacgctcagcactactacagaattacaacagttattaggctgatgtcaaatctaaagaagcatgtgtactgctctaccacacattcttctaatgttttgacaactgtcttgtcataatttgttccctttattatcccatgtatcttattaatttttaaatgttgttctgagaagggactccatatgccttcccagaccaccaaagaggtccatggcgcctttatgtcaggcacctgctttggtgtgttgagcaggaagcctgagatctcagacaagagcttcaagggccccccagcccaaacctctgtctactaacaagtctggttctactttaaggcagttggggttgtggagattgaaaaagaagccccttcacagctgcaaatgagatctttctgggcatctttttcagtgtcgtgggagatctgtatacagaggtatttgtggagctcagagctgaccttccagctcctctgagaggttagatccgggctccggtggcagaggaaatggagactcttccttgccctcttgtccccaccctccccagaaaacctctggcaaagctttatgtgtcatctaaccgtcaccacattcctatgaggtagttttaaacacaagaggaatgtgaggctgagtgaggtccagcaatgtgctggtcacacaaagcttggatttgaacccaggagtccacaagactccaggaccgcctccgaaggtgcgggagggaagagtttcccgccgtctgtgagctgtcgcctgagagaggcaccgagccctggggccaccagcgcagctcaggagccccggggaccatcaaagatgaggatgccaactccacgggcaccctcccccctgcccgcgctggggctcacaacgttttaagaggggagacccgcccctggcgtgtagtgggcccggaaaattcccagacttctcacgaccacccgctctcccctctgttgagggccaggtgccgctctagtacatgctgcgtccccaggacccaccaggcccaactttgcaccccctcatctcccctcctagtttagactttccctggctagcccccatgctcgctggatggcccatggctggagtgacgcgggccaacgcggggcaggtagggggtcactcggctttggctgaaaggcagcgccctctagcggccagagtgcgaaatcagcgccgccggctccgcgctgccccgcctgcatcacaacagggtgctcccctcccgggcaccaaggtcacttcccagagcatccttgcccagtgacctcgctgccccccagcgctggtgaggggcccacaacagacttacatgctcttcttcaactcggccctaggcaccgcgaagtctggccactccagcggagtgaccagctgcatcagcccctcccgcctgtcctctctctccttggaagcggtccctaccctgcgcccctcccatcccgctgcaccagtcccttaggaaacacgcctagagaagggacacgaccttgtcaacattccacagctacctagtgcggagccaggactggaagccagatctcctcagcccattccccaccttaattcacccaccgtattctttagtcaccagctccccagagcccacaaacaactatgaaggcctaacttcattgccatcttgcagcctttccacatccctcatccagaatttctcctgtgctgccccttgacactttatgaccttattacttagtacagtcgttcttgtgttaacagctgttcgtgaatggatgagcggctgtgaggagagggacaaaggggactccaagagaaagactctcataacttgggttagagtcctgctccccaacttaggagctgtgattttaagcaagtcacaagtcccctccaagcctctatatgcttcgtacaaataataaattttagaaaataataatggcttagtgttttataaggactaaacacagtcttgcaggtagatgtgcctggaacactgtccattgattccaatataagaaagcataaaactaatcatagctatcatttattgagcccttactctctgccaggcactgtgctaagtaatttacataggtgacctcatttgaccctcacaacccaaggaagagaatattttgtcaccattttataggtcattaagagattaagaaacttgcccaatattacacagatagttaagtttcaaagccagatctgaaacatcctggtctgactctagagaccatttaaccactaaaacgtccgcctctgctgtgttagtgatctctctgtgccccatggtgtctgacacattatagatgctccgtgtttctgaaatatgtctatttattaaaggctgagcatagcgcctggcccaggagcctaagaaacttgaccgagtcatgcaactattaagttttttttgtttttatttttgttttttcgagacagaatcttgctctgtcgcccaggctggagtgcagtagcgcgatctcagctcactgcaagctccgcctctcgggctcacgccattctcctgcctcagcctcccgagtagctgggactacaggcgcccgccaccacgcccggctaattttttgtattttttttagtagagatggggtttcaccgtgttagccaggatggtctcgatctcctgacctcgtgatctgcccacctcggcctcccaaagtgctgggattacaggcgtgagacaccgcgcccggcgccactattaagttttaggaccaggatttgaacacaaacactctggctctagagtctacgctttttaaccataattctgggctgaatgaataattgcaatccttctttgtcttcctctttgaataaaatgatttgtcattttattcatttatcctctttgtcacttaatattccatgtttcaagagtcaccaggacattctggtgtagcatgaaggtatgataacacaggagaaggaacaaggagaggtcaaggctaggaaaggacattggggccataccatgagctgctgctgggatgttttattaggattgtgacaaatgtatagataagtacagaagaatttaacaatcgtctctacttagattttcttttatgttccttaatagtactgtatagtttgtatcctataggtcctattcggaatgttgttacatttttctggacatttgatgggttttttggttgctataatgaatggaacttttccttctaccatattttctgactaataattagatccaggaaaatttttaatcttatgtattaataagtaccttattaaattgtatgtatatacactaatttagtttattgttttatacaaactataattacataacattctattctgtggatctgcaataatttattcaaccattctcaccagtgggtcttcacctgtttcctttttttatgggggcaggaaggcgacaaagttttgctctgttgcccaggctggagtgcagtggcgtgatcttggctcactgcaatctctgcctcccaggttcaagcaattatcctgcctcagcctcctgagtaggtgggatcacaggcacctgctacaacacccagctaatttttgcatttttagtagagccagggtttcaccatgtgggccaggctggtctcgaactcctgacctcaggtgatccgcacgcctcccaaagtgctgggattacaggtgtgagccaccacacctggccttcacctgtttctatttttttggtattataaaaaatgctgcagtgaatatccttgtacatctatactagcacactcatgcttttatttctgtaagctatagccaaagggacagggtatgtgcatttgaaatgttaatatataatgagtattcccccaaagctccgtaacaatgtatagttctacctagagtgaatgattgcacatatttcttcttacccttaccaaaatttgatttatcttttaaatttttgttcacttaacaggtggtaattctgaaattctgaactctgaatttttaatttgtacttccctgaatacttgtaaaactgaaaaactttttattgcatttcgtcttttgtgaactgcctattcagatactcttttattgtttctaataattctcaattaagtttcttgggttttctagatgtaagttatatcacatataaatagtaataaatttgccttaagatttccaatatttataccctttgctttattttcttgtctaaatataatggcaaacactttcagaacaatgtgaaataacagaaataataggaagcatctctgccttgctcctaatattaatagaaattatcccatattttaccattaaatatgatgctgcaattttatctgagatatacatttctccattatattgaatagtattcatccattaccattttacttaggattttagtgggaattaatgtaagatgttatcagaaggtaatattgactttcttttttatccagtagtatgttaattaatagatttcctaatattaaatcatccaagaatttctaaaaatgaaaccttattccatttgtcatggtgtattatatttttaatatcttgtatgattggttaatttgtgtgtgtgtgtaatttttgattttggttttcttgagacagggtctcactgtcaaccaggccagagtgcagtgaagatcatacctcactacatccgtgaactcccgggctcctcccacctaagtctcttgagtagctgggacttcaggtacgcaccaccacacgtggctaatttttgtattttttgtaaagacatggtctcactttgctgcccaggctggtctcaaactcctgggctcaagtgatcctcccacctcggcctcccaaaggcttgggattacaggcgtgagccaccgcaactgggcctttcaatttttaaaaatttaaataaaatattataaaacagaatacagcagcacatgaaaagaataacatactaggccgggcgtggtggttcacgcctgtaatcccagcactttgggaggccaaggtgggtggatcacaaggttaggagttcaagatcaccctggccaagatggtgaaaccccgtctctactaaaaatacaaaaattagccgagcgcagtggcaggcgcctgtaatcccagatactcggcaggcgcctgtaatcccagatactcggcaggctgaggcaggagaatcgcttgaacccaggaggtggaagttgcagtaagccaagatcgtgccactgcactccagcctgggcgacagagtgagactctgtctcaaaagaaaataacaacatactatgaccaaatggcttcagtttttgtttgtttgtctgggactgcaaagatgtatcaattttaggaaatctattaatgtagatcgccatcttaatatatcttaaagaaaaataatatcattttagttgatatttaaaggcaattaataaaacattcacatccatccttgacattttaaaactcttaataaaatagaaataaatgtatattccttaacataataaaatacatctcattctcaaagctactataatacttaataaggaaacatttaagcatcccccattaaacttagaaaaaagacagagattcattattaccattattatttaatatttttctggagatattaaccaacacaattagaagaaagaaatcagagatataaaatagaaaaggaagtaattatcattatgtacacataatatgattgcataactggaaaatccaagagaatcaactgaaaaatgatagaattaagggaggggagctgggtatgaaattaatatctagtaaaacaaatagcctttcatatatgaacaataatgaaaaattaaaagatataatgaatgatataaagagactgaaaaaataagttaaaagatacaacgagtggaaacaacagatgctggagaagatgtggagaaataggaatgcttttacactgttgatgggagtgtaaattagttcaaccactgtggaagacagtgtggggattcctcaaggatctagaactagaaataccatttgacccagcaatctcattactgggcatatacccaaaggattataaatcattctacgataaagatgcacaagtatgtttattgtggtactattcacaatagcaaagcctgggaaccaacccaaatgtccatcaatgatagactggattaagaaaatgtggcacatatacaccatggaatactatgcagccataaaaaaggatgagttcatgtcctttgcagggacatagatgaagctggaaaccatcattctaagcaaactgtcacaaggacaggaaaccaaacactgcatgttctcgctcataagtaggagttgaacaatgagaacacatgaacccagggtggggaacatcacacaccgatgacgttccacgggtgggggcccgggggagggatagcattaggagaaatacctaatgtaaatgacaagttgatgggtgcagcaaaccaacatgaaacatgtacaactatgtaacaaacctgcacattgtgcacatgtaccctagaacttaaagtatattaaaaaaaagatataatgggtaaaagatgacattttcaatagtgaaaaaatatgaattactcaagaaacaaacttagctaagaaatggacgaggactttatgaagaaaacttctatacatacctgagacacacatatttgaaaaatgaatatcacattctcggatcaaaagaatcaatgtcacaacaaattcagttctccctaagttaaaatataaattgaacatatcccaattttaaaataccaataggactttttcttgatggtacacacagtaggaagggcaagactagacaagctgattataaaaatcagaaaaataaatttatagaaaaattcttgttttccccttttgaattttaaatgctgtgaatgtaattaccacttcaaaagttataaactacaaaaccttaaatatatttttaaaacacatacacacatagagaggattttttaaaataaaaatgtatttattttatatacataattgcaatttgccctttttgacctaatgctatatcatgaacatccctccaggcccatatttatagaagtatctcattcttttaataatatataatattttgtcacatagattaattgaaacttattaaaccatttccctattgatgaaattcaagtgtttgtttttcttcagtttgtttattttgaaacaggagtaatttttcttagccaggattagaagatgtaactataaaaagtaaaacaataaaaatattgaaagaaaattatagcctcaattggagggaaactttcctaaacaatgcaggaaacccagacaacttaaaggaaaagatagatatgttgtatttaattacatacaatgtaaactttccttgtgaaaaaaaagcctcataaaaaaagtgaagagacaaacaacaaattgggagaaagtatttgcctaaaaaaatggcagatgggttaatatctctaatacggagaaagtgcctaaaagttaagaaatgtgaagaatatgaacacacaattcacagacaagggaatactaatgaccaataagcatatgaaaagatcctcaacttcactaatcatggaaatgcaacataaagcaggtctaatttttcatccatcagattggcaaaaatgttaaagtacagataatacccagagctagcaagggcacgaggaaatgtacactatcaagcattcttggtgaacatctgattatcaacagcctttttggagagcaatctgattatagtagaaaaaaagttttaatcatcatattctttgacgcagcaatccaatttaacttaaaaatatatatatgagaaaatagcctttagtgtctccctatgcccctccctccccggctcccagtgtatctcacttggtttaccgcctcacttcccagccagctggactctcatgcccaagccctcctctacctccatcatactctagccaatcaaagctagagcctgggatggggaaatggtcttggaaccctggaaggctttgtctagtgggtccccctgtgcttttaggagactgaagccaaggataccagcagagccaacatttgcttcaagttcctgggcctgctgacagcgtgcaggatgctgttggaacccggcagaggctgctgtgccctggccatcctgctggcaattgtggacatccagtctggtggtgaggatagaccctagagcagagacggccatggggaggatcctgggcttgtgggaagggctggatcccgtgattttctctagtggggaaacaaaggactcttttttttttttttttttttgagggagtctcgctctgtcacccaggctggagtgcagtggcgcgatctcggctcactgcaacctccgcctcccatgttcaagcaattctgctggctcagcttcccgagtagctgggactacaggcttatgccgccaccgccggctaatttttgtatttttagtagagacggggtttcaccatattggtcaggctggcctcgaactctgcctgacctcaggtgatcctcaggcgcccggctgactcactctccttgacattaaggaaagggtgaagaatatattgtctttttctttttcattagaactgatactattgcctctctatcagacactctgtctctgctatatgtttcaaagagcctggcaatctgcgcctcaacctaagattcctttaggctcttatatactataaatttatgaaatccaggtttgagatccagatactgcaatcttcattaacttcagcagctagtttaaccactctgtgcctcaatttgtgtatttataaaatgggaagagtaatacctgccctctatggctatactgaggatttgatatacagaaaagcactctaacagagaccctatagaagttccagctggaaagtagaaataaaatataaaccattttggagttaatcaatggctgggattgcaggtctccctcagatatgggtcttggaagacccatatctcttactcttgtaggagaatggcattcaatatgcagggggcagcctccatctctgcctcttcaccgttttcatgagagtgaatttagtttactatgtataccaaggggagtcttaaaaggaaaagcaagtcatagcggatcaagctgccaagggagtgggggagggggctggcagcctcagcatctgccggatgagttttcagcagagagctggatttaaccgaggttggggttttgcgaggatccatcacagtaggagtaaagctaagggagctgagggtggatataagggagagattattaataatggactacaaaatataaactacagaaggaagtgaagtttgaggagagtgaggggcagtacaaagttggcagggccaatgcattgcaaaattaggtcagagacacccatcgagccaaaacatcctgggttaacccaactattttctccacttctgtatccaggttacagattacttacagggaaaatcaagtgggcagactggcaccatcagagtcatggtctttggatatcaatggtccctcaataattagtctgtttctccagtccattctcactccatttccacacagtggctgtttttaatcatctctggtatttctgtggtctctctcatcctatatttcttagaaaaacttttactcatccttcaagtcagctccagcactaacttcactgtgaagtttccctgatgcttcagactcaggaatctctaagattcctcaattataataactgtggaattaaattgtaactttttgctaatttgtttttacattaggctttaaactctgagagtggccaggcacagtggttcatgcctgtaatcccagcagtttgggaggcagaggcaggagggttgcttgatgcctagagttcaagactagcctggacaacatagtgagaatctgtctctacaaaataaaaaattagccaggcatagtggtgcatacctgtagtgttagctattcggaaggcggaagcaggaggattgcttgagcccaggagttcaaaggtgcagtgagttacgattgtgccactgccctccagcctgggtgacacagcaagaccttgttttaaaaaaaaattttttaaattaaaaatccccggtcatctaatggttaggggaaaaaaaagttctgacagtagggctcacgtcctagtcctcacagccccagcagggcttggcagagtgaatacctaaacatatttgttaagtggaggaacaaataaacctatgaattaatggatgctttgagcatattatttagtcccttaattttcattttccagatgaataaactactgcccaaggagttaggtaacttgcttacagtcacacagccatcgatagagctggaatttgtatttcctgtctgccagcactactgccaggttctgcttcagtccttccttgaagacttctagtgataaggagcagttacggtgaaattcacagaatgctacctgacctctgggtaattcttccctttccattccaggatgcattaacatcaccagctcagcttcccaggaaggaacgcgactaaacttaatctgtactgtatggcataagaaagaagaggctgaggggtttgtagtgtttttgtgcaaggacaggtctggagactgttctcctgagaccagtttaaaacagctgagacttaaaagggatcctgggatagatggtgttggtgaaatatcatctcagttgatgttcaccataagccaagtcacaccgttgcacagtgggacctaccagtgttgtgccagaagccagaagtcaggtatccgccttcagggccattttttctccattctattcacaggtgagtgctcaaatactcctaatgccaccaggtgggacagtgagcagggttgacagtggagatgtaaccagatagttcaggtcctggaaaggcagtttccttcttcctcaatccttttccaacatccccattggcagatgctgcctttcttcaaagcgcacacacaaacataatctcattttgtctttaattttagaactcttacttggggtggccattgcatttttactgacagggagatggtgacacaggggttgaagagacttgtccagtgctactcactggtgaaagtaaaaacagatagaaattaggcttcctggccaggcatggtggctcatgcctgtaatcccagcattttgggaggctgaggtaggcagatcacccgaggtcaggagttaaagatcagcctagccaacatggagaaaccctgtctctactaaaaatacaaaattagccgggtgtggtggcgcatgcctgtaatcccagctactcaggaggctaaggcaagagaatcgcttgaacctgggaggcggaggttgcagtgagccgagattgtgccattgcactctatcttgggcaactagagcgaaactgtgtctcaaaaaaataaaaaacaagaaaagaaaagaaagaaattaggcctcctgattcccaattcagaactctcccagaaatgtggctatatttctaaattcaggcagacaacgagattaggtttgagataatatgggtgtctgtcttaaggagcatttagttggaggaaacagaaaccaattcaaagtaccatagattaaaggaggaaaaaataaaaaagtacagctggccctcatgagttctagctcctggaatcagaaactagaaaggggacaggacgcaaaacagttaccgtttcaaactgtgaagcagcaaggcctctggcttctgcatctgtctttcactctatgcatgctccccctgctccattactactttggcatatcctaaatatggccactccagccccagctttaagtggcttccttaagtcaaattgtgcccaacagaaagtgtctctctgtgtaactatattcctagacaatagagcaagccttcaaaattctgtgggaaaaaaaaaatttacctagaattatatattcagccaaactataaaccaaatgtaaggaaagaaaaaagacactatcatgagatgcaatgactcaaaaaaatttgccttccatgtgatcttttcaaagaagctaccagaggatgtgcttcagtaaaacaagaaagtgaatccataaaggggataaaatgacatacaggaaacaaggagtctaacaaggaagttctaggctggacacagtggctcatgccagcacttttggaggccaaggtgggaggatcacttgagcccaggagttagagataagcctgggcaacacagggagacaccatctctagtggaaaagaaaaaaaaaaggaaattctagaattaaaaaagggcagttagtccagaagagagcaagagaaagacgactctggaagggagatctctaggaggtaaaaatggaatcgacatatcatctttctaaaggcccattaaagacccaataaaaagattaaagaaatggatatggaaaactctgccagtaaaaaaataaaatcaggctctagaaaaaactaaattttacaaaagaaacatagcgcacaacttgattttgcaaaaaataacacagaatccaaattatgtaaacatgactaatttaaataaaatttgtggtacaattatttttagaagaatgcagagaaggaaaatgggtgaaagtataatcctcatctactatattctagcacatcttcatctactgtagcagaaagccaatagaaaatgtctaaattttatcactaggaagcagcaatatgagcatattatttaggaatataataagacatctcgaagagttgacagtggttgtctcagacaataagcctaggaggacaaaagggcactgctattattctctatgaacttttacaactatcttacttctccatgaacttacaactatcttacttttttttttctttttctttgattttttgagacagactctcactctgtggtccgggctggagagcagtggcgtgatctctgctcactgcaacctccacctccaaggttcaagtgattctcctgcctcagccgcccaaatagctgggactacaggcacacgccaccacccatccaactaattttttttgtatttttagttgagacggggttttgccatgacggccaggctggtctcaaactcctgacctcaggtgatctatccgcctcagcctagccaaagtgctgggattacaggtgtgagccaccgtgcctggcctatcttactttttaagaaaaacaagtataaattacccactcaccaccctccccccatgaaaaactggcccagagcctttgaacaaatgtttctaatcacctcctatggttcctagttaattcaaattttcaacttgtttagtttgactgactttgttccttgcttcctggtgtcttcctgtctgacctagctatagcattcagcacttctgactattccctccttcatcaaactgtcatctccagtggcttctgtgactgtactcccctggctgttctacccacctggctgttcttttgtcttctctatttcctcctcccacctctcaaacatgagtattccccaagactcacttctcaccccttcaaccttttctctttactctctctccctagttctcatctacccacgatttaaaccagcatctccctgcaactgaccagcaaatcaacttctccagcttgaacacctttcctaagttttaattaaacgtttaaactaaaaactgtactcctagctcctggatgtcccaccatttcctcaaactcagtatcaaagctatcctcctgagaccctatttctgttcatgacggagtcaactttggttcctccttttttcttaacccccaattcagagagttactaagtactgctgttcttccgcacagcagtacttagtggggaagaatagcagtactttgttattcctttccttccaaaggtgtttttcaggtcttcatcacctcacacttaacatattcctatagtctcctaactagtgagtcccttgagttcagcaactgtgccctagtcacctttgtatctcccacacctaccacagggcctagcactgagctgttgcctaatggtccagcaactctaaatactgtttctgcctccaatccattctacatactaccaccagcttgtctttccaaaatgctaatttgtacatgccacatcactcaaagttttaatggcttctcactgtctatggaataaagtctaaattacattagcctggcactagagactctatagcatttcattctatttatgtgaatacattgcttcagttaaactgcactagtggatactcctctttcattcatctaacaaatatgtattgtgcatcccaggcccagcgctatgccttggagaacagaatgaggtataacacagtccttgctccttataacctaaatcctgttctcctaatatattgttttagttgtgaagattctccctaaggaagaatgcttttctcatcttctcagcatatttaagtattagagtcagcacatctagatggttccccaagtgtggaaattaggtgcattttggaaggtaaaactagttaagaagagacaggtaataaacaatgtcagggtgggtggtggctcacgcctgtaatcccagcacttcaggaggctgaggctggcagatcatttgagatcaggagttcgagacaagcctggccaacatggtgaaaccctgtctctactaaaaatacaaaaaatagccgagtgtggtagcacgcacctgtaatcccagctacttgggaggctgaggcaggagaatcacttgaacccgggaagcagaggttgcagtgagccgagattgcgccactgcactcgagcctgggcgacagagccagactctgtctcaaaaaaagaaataataaaataaaataaaaaacaatgtctgccatttactgagtgcttactgtgggccaggcattgtgctaagtgatattatattatttaatctccatggtcttttgagctattgtcctgtgataactcaagcttgaagataatttatgttcatccaacagtaaatgatggataaaaatccagatctagtccaggtgcagtgtctcatgcctgtaaccccagcacttagggaggccaaggcaggtgcatcacttgaacccaggagttcgagaccagcctgggcaacacagtgaaaacctgtctctacaaaaaatacaaaaattggctgggcgtggtggcacatgcctgtagtcccagctactagggaagctgaggtgggaggatcgattgggctcggggcatgaggctgcagtgacccatgatcatgccactgtactctagcctggatgacagagcaagaccctgtctcaaaaaaacaaaaacaaaacaaacaaacaaacaaaaaaaacccagatctattccaaaagggcaagattttaacttatgctagattgcttgaaccactctagaaaatggggctatttggggatacccaagtccaaggcgactaagctgtttcagctatctctgtggcaaaactttagaattactttaagatctatctgcatccctagtgtctgacacacaggagattctatacttatttatggctgcctaagtacatcatcattacccacaatgttaaaaatacttatttgggcaacgaattacagagggaggaatccttggagatcataaaagagatgttatgagatgatgcaaaaggagatactgatgatttctgaaaccctcccctgatccatgattctcttttgaaccagagacagggaactacacagtgacgggattgaaacaaagacaacaccttgagttcagccataatgaaggcactctcagttcaggcttcctacaagaaaaggtctgggtaatgctggtcaccagccttgtggcccttcaaggtatgtccaaaagagccgtaagcaccccaagcaatgagggtgctattatatttctgccaccttggttattctccaggaggagaaggttggaaaggatgtccagggggagagaaaaatgttactcaagccctggctatccacaggaaagttcaaaccagtttcactgatccaaaggcactaaggaggaagacagataaatcagacttttcaatgggtaggaggtaagactcattaggaatgaaggcctgtgagagaggcaagttagtacaactacctctactcactgcatgaacagagggctacaagttgaagcaacagattttcagctattagaggaagaaaaggcaagagacagacttggtttggagatgggttttgaacaatgcggctcctcagcaaaggctgatggccagattgagtatattaaacacatgtagctgagtcctctgaaaaccatttaccaatatagattagcgttttccctattagataacaaaaagtgaaacttccaataatttgtcataacgtttttgcataacaagcaactgattcaggtttttgcctggccttggcattcttaactccattttatttaggcattcctcaaatcaataactaccactgttttgaatggcatcagaatgtaagctctatatatatgtaaggactttgtcttctttaccccaacgaaaagtcccacacatatggcaggctcttaataaatttgttaaaaaacctgtatgatgaatcagatgctttacacatgatgattctaaccttatacaacccttgcaagcaaacatcccctggttactcatcaggaaacagacacaaggaagttaaatagggcctggtgcggtggctcacgcctgtaatcccagcactttgggaggccaaggcaggcagatcctttgagcctaggagtttgaggccagtctgggcaacatggcaaaaccccaactatacaaaaaaatacaaaaattaggcatggtggcacacaactgtagtcccaagctaaggcatgaggatcacctgagcccaggctggttgaggttgcagtgagccatgatcatgccactgtactccagcctgggtgacagggtgagacactttctcaaaggaaaaaaaaaaaaaaaaagagttaattgttgcctgtcacagcaattaatacagatccttctcactctaaaaccttacactcagtaatgatctactatatgcaaagcacctcttacatccttcaccaccccattcattctgagattgactcctcccctttccagaaacaggaccacctaaacattccctattccagtcccttatttgcaagtcatcaaaagaaaacagagatttcaaaaagaaaacagagaccttatctgtaatccttggtaaggatcttccaaatttaagcctatgccagttttcaggaggaaacatgaatatgaaacagtctgacctttagacataattttttgttgactttaaattcccttggttaggccactgtaaccagtaaaataaattttattttagaataaaaattataaaggggaaattgagtctagccatacaacctactactagttactatctttgattcccaagtcatcctagagcaaaaaaaaaaaaaaaaaaaatcatctctggcctttttttccttttccactcaggtgaagagaatgagcttttgaatccaattttttgttttctcctatattcaattcaagtagctttaaagttaaccaaaggaaaaaaccaaagctcaatatttgattaaacgagaaaatatacactacttagaagctttcttttctttatccttcttccccaactcaaggcttagtagaattattgaaagaggtagtattcagtagaatagtacacatgctttttcaggtccagaaacaccacataggtcaagttatcatgcttacatgtggggaaaaggaggagggagtttcctggacctctgtgcctctctcagctcatgaactagtttcagtgaatatccttgtcttaccactgtgccaacaattcagagctatacgtggaaaacctaccttcaactttttgagtggcatctattgcttctttgattgttccttccagcaaggagcgatcaaaggctagcccccttcccactcccaccagaatcagatttgctcaagattacaaccctaatttagtaataagatgcaatacataaaatagttcccactttccttttccaatccctttacagtcatgagggcctatcacgcacgcatctcaggacaggtgagacttcattatatcaggtattttgttgctattctaagttataaggcagtaatacaaactttctttccacagctttgtaagccttgtgccaaaagaaacttttaaaacagctacagcaagatgagtctgactatggcttagtatctttctcattacaataggcacagagaagaatgcaacagggcacaggggaagagatgctaaatataccaagaatctgtggaaatataagctggggcaaatcagtgtaatccttgactttgctcctcaccatcagggcaaacttgccttcttccctcctaagctccagtaaataaacagaacagctttcaccaaagtgggtagtatagtcctcaaatatcggataaatatatgcgtttttgtaccccagaaaaacttttcctccctcttcatcaacatagtaaaataagtcaaacaaaatgagaacaccaaattttgggggaataaatttttatttaacactgcaaaggaaagagagagaaaacaagcaaagataggtaggacagaaaggaagacagccagatccagtgattgacttggcatgaaaatgagaaaatgcagacagacctcaacattcaacaacatccatacagcactgctggaggaagaggaagatttgtgcagaccaagagcaccacagactacaactgcccagcttcatctaaatacttgttaacctctttggtcatttctctttttaaataaatgcccatagcagtatttggagtattttcttttctcctaaatccacaaactctcttctttctctttggacagatgacctcttgtcatagttaagcagagagtgggcaggatattcctgataggaggaactacatgaataaaggggtaag

SEQ ID NO: 31 - DNA, 153008 bp, Homo sapiens
aactttggctcagcctgtcttcatccactgtatcctgacacctctcctactccttctctttaatgtacagctgagactgggatacccttagactgaaaggaaggacacggctatgtagaaaagaattgactgaaggggaggagtactcgtgaaccccttgcttcagcctcccaatgttctgagagaggaggagccaggtaactgctgctaactgccatttccccaccatctgggcctaaggaagcagaagtaaggcttaattaatagccagtattgcttggagattcactttacttatttaaaccaacaaaaagacttaagatttagcctgttggaatatggttctaagaggcttatatttccaagaaactagtccttagtttcttttgttctttgctactttgtgatccctgctagagacaggccacttgctttgggttaccataattttctttttcttttttttttttgttttttgttttttgagacagagttttgctcttgttgcctaggctggagtgcaatggcgtgatctcggctcaccgaaacctccgcctcccgggttcaagcgattctcctgcctcagcctcccatgtagctgggaattacaggtgcccaccaccatgcctggctaatttttgtatttttagtagagacggggtttctccatgttggtcaggcttgtctcgaactctgccctcaggtgatctgcccacctcggcctcccaaagtgctgggattacaggtgtgagccactgtgcctggcctgggttaccataattttctaagcacacttcctagtgacacctggcccagtttgacacctgtgtagaagcaataatcaatgaaagcatcttcagatattctaggcccatactcagagccagctggactttgatttggtattggtcccaacctctggggtgacatatgctgttcttcattgattttgtttttgtatgttttgagacagactctccccctgttgcccaggctggagggcggtggcgcaatctctgctcattgcaacctccgccgcctgggttcaagcgattcttgtgcctcagcctcctgagtagctgggtttacagtcatgtgccaccaagcccagctaatttttgtatttttagtagagacagggtttctccatgttgggcaggttggactcaaactcctggcctcaagtaatccgcccaccttgagctcccaaaatgccgggattacaggcgtgacccaccgtgcccagaatgtttttgaattatagaaaaccccttgggtttggtgggagggagtgagggtttcatccatgacacagtgacacttaaaaaatcagtttattcaaatgcactaaaggaattgcttgataaattaaggacagtaatacctctggccttagatagaaatgattagaaggtccttcttagatagaaatgattagaagtccagaggaatctgggaaggaatttctaaattttctctttccattgacataaggtaccagggtatgaaattcatttgtccttgtatatatgcatttatttaacagatattgggtatctaatacatattagagaatcatcccttagattatcttgatagagaaaagaaaagttctggagaaatggtggagagtcattcccaggaatatagctttgtaagaaaattttcctggatcaattggtaaagttttctggaaccactaggtggtgatattacattatgaaaatgacatgctttccttgacacctttcaaataactgcaggcctctggtaatttctgaggccagtgtccccacaaccaaagaaacgtcttaatgagtaaatgaagaaaaacacattccatcatttacatatataaatttacatatgtaaatttaaatgctccaggggactggtagttcctcgagagaagggtctgtgcctattgttttcatggttacaacctcaggtggcgtgtaggaagcccttgatcaatgcttgatgaatgaatccaactctgaacaattttgatgaccattgaaaggaccattccaagagtgtggcaaaaaaggtggcacatgtccaaaaggcctaggattttgggaattaggagctgttgatgatcctgacagattatcagttgggcagagactcaggaaggcagtatttggaagggcagaaatatcaaaagtgatctgaggcacttataattctttgtatcccctaagcttaccttggccagatttcatcctttaaaaaatacagggaggggccggatgcggtggctcacgcctgtaatcccagcactttggaaagccgaggtgggtggatcacgaggtcaggagatcgagaccatcctggctaacacagtgaaaccctgtctctactaaaaatacagaaaaattagctgggtgtggtggcacgtgcctgtagtcccagctacttgggaggctgaggcagaagaattgattgaacccgggaggtagaggttgcagtgagccaagattgcaccactgcactccagcctgggcaacagagcaagactctgtctcaaagaaaaaaaaaaaaaaagaaaaatacagggagggtgtaaaccaataaattctgatgtatgtatatgtatatatatatatatatatatatatatatataggcaagggttgaagataaataaggtagaaatgtctactttatatttttggccttaactatgccagtgtaattagaattccctatatttaaaatggttccttttacttattgaatatatatgtataaaattttttgggggtctatattacttcttgggatggctttgccttagaaggaatcttcaaaaatcatttttaaaaaactcttctctgcctctcattcattgttttatttgctcattcatttatttgctataaattcattcattcctcaaatatttattgagcacctattatgtacaaagcagtggtcaagtttgtgtgatcatctttgaccttttctttttatggtccatctgaattcggttaattagcaagtcatattaggtgcagcatccaaatctatccacttctctctgctttttctgctattaccctagtccaggtctctgtcttcttgcatctggattattgcattacccctagtctttttttttttttttttttgagacagggtcccgctctgttgcccaggctgccaggttggagtgcagtggcaccatcacagatcactgcagcctcgacctcctgggttcaagctattcccccatctcagcctcatgagtagctgggattacatgtgtgtgccaccatgcccagctattttttatattttttgtagacatggggttttgtcatgttgcccaggctgatctcaaactcctgggctcaagccatcctcctgcctcaaccttccaaagtactgtgattatagggatgagccaccatgccaagcctaacccctgatctttaccccgaccatccattcttccatctttccaccatgtgaatatcatgatacatctttccttaaaactctcctttccccttaggatcaagcctaacctctttcacttggtttacaagcctcacaaggcagggctatgacctggcttctctccccccagccccattgccactcactctcaccttgttctatgtgctctagccaagacttttttctttaggttcttctaatgaaccatgtcctctcttaccttctgactttttttttggtactttttcttcgacttcttcttcccccttctgcctggctattttctactcattctttaggtctcagcttacatatgacttatttgggaataagctttttctgaccactgtcaagatgaagttctcctctttcactttttctctcatagccactattggggttcacagcttgtctgttgccaccctctactgccagactgacttctgcgagtggcagagctctctctgtcttcactatataaatatccggcacctcactgagtgcctggcccactgtaagtgcttaataatatatgttgaatgagtgaataaatgaaaaaatatatatgatgtgtcttctttcttcagtgtacttataatccagcagtgtgaggtaagtggtacaaagaaagaactacagtgatgagaagaaggagaggtcactttggatattaccatttaaggctgggttgggttttggcaagtgaagatgtttgtggaggtggcgtttgaagtggagggaagtgacataggtgggaaaagtttggggagcaggcaaggagcatagtgttcctatctcagaagagtaggagtgggactgaagacagcttgtgactagattgtgcagggcctcgactctgatagccaatgggaagacattgatggcttctgaatcagggagtgatagcactaaatcaatgccttagaaaatgctaatctaatggcagagtgaaacatgaattggagagagaacagcaagaccagttaggaggctatcatagaaatcaagatgggaggtgatcagggcctgaattatgtagatgtcaataagaatggagacaaaaggatactatgcaaaggaagaatgaaccagaacccggaaaccagaaaggaagagtgagggaaagggaggagtgaggtgctttattatcggaaatgtgaagtcaagaggaagaaccaatttaaggaaagatagagatcattaatcaaacctttacaatgaaattgtggttatatatacattttacttatgagaattccgtcaatgtgtggggttaaaatgaaagcccaagtgggagggagtgacaaagaagatgcactgcaactaatgggagctgttccagttcttccactctgaaaatacgtcccagagggagtgtgagatggggaaggtcaagttgctgttcctcattttatgtcaaccatgtgtattttatggttgacatagggattatttaaggataactgtggttattcatgatttatgtcttatacactgattttagaaccaaattcccaagccagattttgctttttatttatttatttttaattttattttttgagacagagtctcactctgttgcccaggctggagtgcagtggctcagtcttggctcactgcaacctctgcctcccaggttcaagtgattctcctgcctcagcctcctgagtagctgggactacaggtgcccgcccccactcttggctaatttttttgtatttttagtagagatggggtttcaccatgttggccaggctggtcttgaactcctgacctcaggtgatctgcccacctcggcctcccaaagtgctgggattataggcatgagccaccatgcctggccagattttgctttttatttttattttatttatttttacttttttgagacagagtctcgctctgttgcccaggctggagtgcagtgccgtgatctcggctcactgcaacctcgcctcccgggttcaagtgattttcctgcctcagcctcctgagtatttgggactacaggcacatgccaccatgccagctaaatttttttttgtatttttagtagagacggggtttcaccgtattagccagaatggtctcgatctcctgacctcgtgatccacccgccttggcctcccaaagtgctgggattacaggcatgagccaccgtgcctggccagattttgctttttaaagcatgtgccaggccccaggcttggcagtaggcagatactaagaaaacacgtcagtcactgcattggagctgctcacagtctagttgggtagaaagatatggaagcagacagtgagcactacagtctaggtgagcagtcagagagaagggtggaggcagagggaaaggagactggtggctggtgtgtcaaggcagaggtggtgctgggccctgggaatggagagagatctaggagtcgttagaacaggtgagcgcagcaataggcgtgcatgagctctcagagggaaagaatattgaggagggaagaggactaaaggccacagccaggaacacacaagaaggtaagcagagtcagaaaacagaagagttgtcagagaagcagcaggaaaactcaggcaagggggatgaggactgtgaataggcaagtggtctgcataatgaggaagacaatggtgactgcggagtgaatgaagtttcagcagtgtggtgagggcaaaataaggggtccccaggccgggcacagtggctcatgcctgtaatcccagcactttgggaggctgaggcgggcggatcacgaggtcaggagttcaagaccagcctggccaatatggtgaaaccccatctctactaaaaatacaaaaattagcctggcgtggtggcgtgtgcctgtaatcccagctactcaggaggctgaggcagaagaattgcttgaacctgggaggcggagcttgcagtgagccgagatcacaccactgcacctccagcctgggcaacagtgcaagactccgtctcaaaaaaaaagaaaaaaaaaaaaaaggtgggggcaggccttcagtgattggaaagaatctggaagcaaaggcaatacatgccacttctctaagttccagctccagaacaactaacttagatatgtcctctagtttccaatcagatttccctggagaaggtttgggatccctggatgccatgacctttgcccctgtttctttacagtatggtctgctatgtccactggaagggcacttcaccatcacagtacatggatccagaaacagactttactctacataagccttatattcaaacctgagtgcaatccagctgatctcaactgtggttgttgcattttagactacacatatctatattattttcttccataagtagcatccatattcccacatgattgcaattgctaacttgctaatagcttcccttgagtttgcttcttgcaattatctaatcagaaggcaacatatgcaatttattacaggatgcagggagctctgggtgttttttttttttaagtcaatggttcctatcctagttatactgttcttttaaacagatttaaataataagaaaagctatttcatatatacccatgtggttagcatttccagtgttctctttattcctttgtgtagatccagacttccatatggtaccattttcccacaacttgaaagactaacatttcttgtagcgcatgtttgcagatgatgaattcagtcagcttttgtaagtctgaaaaaaatctttattttaccttcatttttggaagatattttttgctgggtaaagaattctgtttttctttttcttctttttgttttatttttcttaagagtcagggggtcactctgttgcccaggctggagtccaatagtgtgatcatagctcactgcagcctcaaattcctgggctcaagcaatcctcccacctcagcctcccgagtagctaggactacaggcatgcaccaccatatctggttactttttaaattttttttgtggagatgggtcttgctattatttatatacacaggctggcctcaagccatcctcaaaccatcccttcacctcggcctcccaacatgctgggattacaggcatgaaccactgcactcagcctgttttttttctttcaatacattaaagatattgcttccctgtcttctgtcacatagtttctgatgagacgtctgatgtcattcttatttttgctcctgtgtatgtaatgtgtagttttttttttttttctggctgcttttaagattttatcttttcactagttttaagcaatttgatcatgatgtacttttaggtttcttcacgtttcttctgctcagagttcattgaccttcttggatttgtggggtttacagttttcatcaaacttggaaaaagcccaaccactatttctttaaatatattttctgtcccctactttcttctgggattccagttattatacatatctattccagttaataatatgtgtctattaggctgcttgaagttgttccatagctcactgatgatccatttattcatttattttggtcttctttgtgtttaattttgggtggtttctactgctgtgtcttcgagttcaccgatctttttttgtgcaatgtctaacccattgttaatcccaccttttgtgttttttatctcaggcattatatttttcacctctagttgttcaattgggtctttttatatatataaatatatattatatatttatatataatatataaataaaatatatttatatatgatatataaataaaatatatttatacataatatataatatataaatataaatatatattatattttatatataatatataatatatataatatataatatataagtatacattatatatatttatataatatagaaatatattttatataaatttacatactcattatatgattatataatatactcatatgattatataatatactcatatgattatataatatactcattatatgattacataatatactcattatatgattacataatatactcattatatgattacataatatactcattatatgattacataatatactcattatatgattacataatatactcattatatgattacataatatactcattatatgattacataatatactcattatatgattatataatatactcattatatgattatataatatactcattatatgattatataatatactcattatatgattatataatatactcattatatgattatataatatactcattatatgattatataatatactcattatatgattatataatatactcattatatgattatataatatactcattatatgattatataatatactcattatatgattatataatatactcattatatgattatataatatactcattatatgattatataatatactcattatatgattatataatatactcattatatgattatataatatactcattatatgattatataatatactcattatatgattatataatatactcattatatgattatataatatactcattatatgattatataatatactcattatatgattatataatataataaatatatatatcttccatgtctttacttcacatactctttttttatttttatttttaaacagggtcttgctctgtcacccaggctgtgatcatagctcactgcaacctcgaactcctgagttcaagccatcctctcatgtagctaggaccacagtcatgtgccaccatgcccagctaattttaaaagtttttgtaaagatggggtctaagttgctcaggctagtctcagactcctggcctcaagccatcctcctgcctcagctgctcaatgtgctaggattacaggtgtgagccaccatacctggcgtacttaacatgtcatttctcggttggtttctattgattttctccttattatggttcatatttttttctgcttctttgccatacctgttcactttttattagataccagatttaacaaattttgcctttttgggttctagatatttttatattcttacaagtattctttagcttgttctgggatgcagttaagttacttagaaacagtttgatcctagctgggtgcggtgcatgcctgtaatcccagcactttgggaggctgaggtgggtggatcacttgaggtcaggagtttgagaccagcctggccaacatggtgaaaccctgtctctactaaaaatacaaaacttagccaggtggggtggtgcacacctgtagtcccagctacttagcaggctgaggcataagaatcacttgaacctgggaggtggaggttgcagtgagctgagatcttgctactgcactccatcctgggcgacagagcgagacagtatcaaaaaaacaaaacaaaacaaaacaaaacaaaaaccaaaatcaaaaacagtttgatccttttgggtcttgcttttaaacttttttttttttttttttttttagatggacaagtacagcatttaatctagggttgattattccccacaactgagggaagacccttctgagtattctatctaatacctcctaaggaattagaaggtctttccactctggttgatgagcttaagaactattcctggccctgtgtgagctttaaagattgttccctgtaattctttggtggttctttccccagccttgggatactttcctcaaacccatgagctcattagcacttagctgaagttgtgagtggggactctctggagacctctggggccctctctttgtgtgactgtctcctctctggtactctgccttggaactctagctgccttggcctcccgaacttctcagttcagggatttggagttggcctgagttccctctcccttttggaaagtctctcccgggaataagctgggctgatcacagggcacagcttgtctcttttctgtttctcagggatcactgtccttcgttgcctgatgtacaatatcttaaaaaccattgtttcatatattttgtccagtcttttagttgtttcaggtgaagggaaaatccagttcctgttattccatcttggctggaaacagaagtctatattgttttttaattttgaaaaactgagggcctctggaatgtaggattatgccaggccaagttgctcattatcaggccaggaaaagcagctcttgaagaggctgaaagggcttccagcctaactgcgagggtgctgagtcattctagcagagaccaggcactctgcttttctggctcttatcaagtctttagcttttatctttggactcaacttactagttcacattcctttggtggtgaaggtttggtctcttccactttgaagcagtatctctccgcttacacttgaaatcttgaatcttttacttggttctctttagtccctgtttgtgtatttaggtcactagaggcttctacatctggggcacattaaagttcctcagtggtatttacagcaaccagcatctgtttctgtagagaacaattaacccaaagataccaccttgttctaccttgaagatgaattacagagacacttttaaaaggcaaatccttcatttcaagggtgaataaaataccacttaacaaagcattccagctggttaaatttaggacatgaaaaaaacctgacccaagaatatcgtctggctttgagtccagggtgtttttccttttagagtaaatttggtaccttttcattcatgtgaagttgttgccccccagcattttattctgggatgaaaggtcaacagggactgtcttgttgctaaatctaatggacacttctcagttattaaacctactggacctcttaacaatatttgacactgttgactattatttccttcttaatacatcccctgacttttccttcccctttcaggcctttcttcctctgcctgttttttcagttggtactactcttggttctgtcctgagctttctcacattaaacattccctgtgggctgtcttatgcatgctcatggcctcacagggaattcctaaatctatatttctagcctaagtattttttgctgagcttcagaccattatgttcaactgttcacttgacatcttcacttggatggcacatgggtcacccaaccttagcaggctcacagttgaactcatccattctcccctcagttcagccctgcctctcatgttcttcatttctgcaaagggcacttctaaacaatttctcaagccagaattccttgcattccatcttctactcaatcaccatggcctgttgattctatctctttccatccctattgccacttccctagtttggtcattgtcatcttttacctggatgaccagaaaagacttctaagagcaatttttgcttccgaccctcatgtcatgcaaacgcctccacccctaaccaatttgtttttttttttttcgtattctagccagagcaatctttctaaaatgtgaattaaaggctgttgggatcttgcttaaaatatttgacaactgctctatgctcttaaaataaagcccaatctccttataataaaatatgcagccctatatgatttatttattttttttttgagacagagtttcgcttttgtcttccagactggagtacaatgcgatgatctcagctcactgcaacctctgcctccgggttcaagccattctcctgcctcagcctcccgagtagctgggattacaggcatgcgccaccacactggctaattttgtattttagtagagatgggtttcaccatgttggccaggctggtctcaaactcctgaactcaggtgatccacctacctcagcctcccaaagtgctgggattacaggcgtgagtcaccgcgcctggccgaggccctgtatgatttggcccctgtttactttcttgcatattactgattccctcacgttctaagttccctgccacatttcccattgttcagttcctcaaacgtacaacgccccctctcactttctggcctttacatgttttgttctttctgcctgtaacccttccttcctctcctatacttggctaaatcatactgcaggtgattttctttgggcagtcttccttgaccccctttatcatcttggtttgcctagctccccagattaagtgaaatgttattctatgcttccagaggttgctgtgtttcctctattgtaatgcttacccaatctcccacttgactataaactccatctttttcactgctatatgtatccccagtgcccagttataaggctcagctccataggtgcttagcaaacacttgttgaattgaactttaatgtgtcagtagccacagaagtctcagtcctgctagaccgtagccttgccactttgagcaagaggactgctgggagagatggtattctataatggttctcttgctgggagctggatttttatttccccactgtttatttactagtttagcaacctgattcagttaacaactctgcatcttagttgcttcatatataaatacaaatgcttgaactttctgaaagcaaatggtgggccagatttttttttctttttcatttccttggttactagaaaacccaggtagcttttgaggcaatttctataagaccttcaagaaacagatgatgccaatgcaattttggctatttcagaacccaggaaaaaaatgaagatttgtcagtgctaggtaggaagctagacagagacaaaaaccaaataaggttagaaacaggaaactatagacaaaaggtcaaaggtaaaaatctcttcatagaccaatttgactgatgcctatagatgtaaaaatactaataaaatattagcaaatcaaatcccacagtgtatgcatgatcgagtcagtagagacggggtttcaccatgttgctcaggctggtctcaaactcctgacctcaagcgatccgcctgccttggcctcccaaagtcctgggattacaggcgtgagccactgtgcctggccaaattcatttttttagttaaaaacattttacatttttctggccatagaaaagtctttaactttaaaaattttcacccaaccatttgaaaatgtaaaatgcatccttagctcacctgttgtacaaaaacaggcagccagccagatttggttggtaggccatagtttgccaacccctgcactaatatgttcactaaatttgaaccatttttgcatctctaggataaataccaacttgatcatgaatatactgttggatttgatttgcttgtattttattagtatttttacatttatattcataagtcagattgggctatgtagaaatttcaaactagctgtggggtatagatgtattctatttagccttcataacattttaaaacattttgaatgagttattaatattaacaaattgggaaatattacatggattatttaagattgctggcttttctttaaaaaaaagtgacaaaactgggagaatgttggcctagtttcgccacattttaatagatctgctctattgtatattttctttcttttttctttttttgagacagagtcttgctctgttgtccaggctggagcacagtggcattatcttggcccactgcaacctctgcctcccgggttcaagtgattctcatgcctcagtctcccgagtagctaggactacaggcgcatgccaccacacctgactatcttttgtatttttagcaaacatgggtttcaccatattgatcaggctggtcttgaactcctgacctcaggtgatccatccatcttggtctcccaaagtgttgggatgacaggcatgagccactgcatccagcctctattgtatattttctatttaattaacttctattcttacttttatcttttacctttggtctatagttttctgtttctaaccttacttggtttttgtctttgtctagctttctacctagcgctgacacatctttgttttttcctatgttctgaaatagttaaaactacattagcatcatctgtttcttgaagatcttatagaattagcctcttaaaactatctggattttctataattttgtcgaatagagttttggtttccttttctattttatctatagttagtgatctattaaaaatttcaaactttttatcaattttactaattaatactttctagaaaatcatccagttcctttcagattttcaaatttatacaataaggttgcagtggttttctcttataatttaaaatattagccagcacggtggttcacgcctataatcccagcgctgtgggaggccaaggtgtacggttcacttgaggtcaggagttcgaaaccatcctggccaacatggtgaaaacctgtctctactaaaaatacaaaaattagctaggtgtggtggcgcgtgcctgtagtctcagctacttgggaggctgaggtatgagaatcgcttgaacctgggagtgagctgagattgtgccattgcactgcagcctgggtgacagagcgagattctgtttcaaaaaaaataaaaaaaaagaggccgggctcagtggctcacacctgtagtcccagcactttgggaggctgaggtgggcagatcacctgaggtcaggagtttgagaccagcctggctaacatggtgaaaccacctttctactaaaaatacaaaaaattagccgggcatggtagtgtacacctgtaatctcagctactcggaaggctgaggcaggagaattgcttgaaccttgggaggcggaggttgcagtgagcagagatcgcaccactgcactccagcctgggcaacaagagagaaactctctcaaaaaaaaaaaaaaaaatcacctgtatatcttggctttctcttccctaaacttgcttatttctggttttctgtatacattttgccagaggtctattttactgaacttttcagagacaaggctttggtcttattgttgaagtttatttttttgaggataaatttcacctttaaccttatttccttttaaaattttctcctggccaggcgcagtggctcatgcctgtaatcccagcactttgggaggttgagatgggcagatcgcaaggtcaggagatcgagaccatcctggctaacaggtaaaaccccgtctctactaaaaatacaaaaaattagccgggcgtgttggcgggtgcctgtagtcccagctactcggggggtgctgaggcaggagaatggcgtgaacccaggaggtggagctttcagtgagccgagattgcgccactgcactccagcctgagtgacagagtgagactccgtctccaaaaaaaaaaaaatttttttttcttctgaattagcttattcctcttctaactttttgaaatgaatttttagttaaaacactttaaatctttgttattttctaaataaattatccccttgaactttctactctaattccatcgatctgtcttttctttttagttttatattatttaacaccatttaacatctggtagtacaagttccctttgttattatttttctaagttttcttggttattattgggctagatgatatcttaaagtcactaagattctttgagagttattgtgaaaatgcacccaaataaatccatttagtcccttcttttcaaactcaagtattccttattattccagatatagtcagtctttaaaaaaatgcctaaaatcattgctcgatactttattaagtgcttcaaatcaatctgtatatatgcatatggtatatatgtagtgtatgtgttttgtgtgcatgtgtcagtgtgatgtgtgcttatatatatgcataggatgcatatataatgtgtggggtgtgtttgtatatgtatgtgaggtgtgtatgtagtgtgtttatgtatgtgtatatgtgcatatgatgtgactgtgtgtgtacatgggatatgttgaggtatgtgtatgtatgtgtgcagagtgtatgattgttatcgtgtgtggtatgataatgtatgtgtggagtgtgtgtgcacatgtgtgaggtggaagaaccccagggggtgctagaatgctcaggacatgtgagaaagccaggcttggtccaactctcctgccttcttggggaaagcagggccatgatcatgagcctttctggatgttgcttttggacagcagtgtgggttaatagggccagtctctcctgaagtgccctgcccaagctcccactcacctctctcctccatctcttgaggaaagggtgaccgacctgtccttttaggaaaaggaagcttccagcacgctactgagtaaaggagccttactggtggtggtgaaggtgataccatcagaggggccagctcaggatcaggctggccttgcaatcttccaactgaatatgttagctgcagagtggggcaggagtcaggaggggacctacaaagcagtagaatctttgttcccattaccgggtgtaagtgcccagtgtgggcctcggtcttttctctcctaggtcacattcagacagcacacctttgcccaattttctttctggatctcaccgtcctgagtgttgtacctgcaggttgctcacagcctctggagcccaagatagtctcccctttgggaggaggctctacagtggtccctggcgaagttgtgaagaggtgactatcatctcaggcacatcaccttcccttttccctgtgggccttcctttgctgtttcctgaacaccatgctttctagttcctactgggagtgaacacaccttgcatggagcatcttcaggccatggctaactcatgctcccatcttgctcctgcaggtctgccacgtctctgtgctcagtgtcctctctacatcctgtggcttgagcctgagcttgcccatattccctggctggatggagtggctaagccctgatatcgctctgcccagaagagatgagtggactcaaacttctccagccaggaagaggatcacgcatgccaaagtccagggtgcaggtaagtccatctgtcactggcttgaggctaggagagtggacctgctcttgttaaaggcagtgttcaccatgtgtgtgtgtaaccggggttggagggggagagtggggtggggtgggggggtgcagtaaagagcagggcaggacttcacgaagtgccaggattcaaacaatcctacggcatttatgtgatttatcaccagtttgctgattcagggctccttctgcagtttctgctcctcgctggtggccacctgaccctgtggcgtttgctccttccacctgctgttggccatggggcagatgtggaggccaaggaagaataggacaatggcgtttggggcagacaggcctgggttcaaatttcagctctgcctattcctagctctgcaaaccttgggcatgtcacctgtcttctctgcctgaggttcagatttcttcctggtaaattggggctaatacttattagacttaccgtgaagattaactgagatgatgtgtgtaaattgcccagctcagctcagcctctggcatctggtactcaacacataactcttctctccactttctgtcttgcatctccccatcttgtttttgagtggatcactgaaccacaaatatccacttggcgatgaagtctggggaacagggacaaataccaacacttcccatttttagatttacacgagactaacagctttccttcccacagtggcaacagagatttgcagagcagatgtcttggtgtgaaactgctacgaggaggtgtcctgtaaatgtttgctgacaaagcagcaaagcagggtttgaccttccagctctgcctccccgcaccaggctgggggattcacccaccccactccgtttcctgtgcgttcctctttctcagaggctgtgggcctgtcctgctgtccgatggcatcaggctgtgggacggggggccatcaggttggttggagcaagctgctcccatccggacctgtgtcaggcagcacttgttcaagaggaggctcaagagagtgatccaggatgcagggtttgggaagaggatgcagcatggtggggggcgacctgtccaagcgcagagaacacttttccaaacctcactgccctgggccatcgggtgctcctttgcctttgcttggatctaatgattataggcctgagcttcaaagcaggttataaacccgactaattgctggtctaggagagctggacgaggaggccaagcctgcccagagtgggcaccccggactgggccttctcgtgggactggcatttccaaccgggagcgcggtgctggggccgggatacccggggtggccgcaccgtcctgctggctccttgggtggctgccgtcgctgctcagcgcgggtcggcggcgccgcctcccccaccccggcccagctctgctccggcaggtggaactctccccattcaaacccgcgcgggccaatcagggccgggcgcgccctggccgttccaacgcttggggcagccctacctcccgctcgcgctcctcccgccctggagactccggttactggggagcaacacagccgcctcgggttgcagacgctcctgtccgggtcgcagtgggacgccatggagcgctccctgcaccgcgtctccctcgggagccggcgtgcccacccggacttgtccttctacctcaccacctttggtaagtgcccgctggggctggcggcaggggctgcttcaccctgctcccagcgcccagaaacgcagcccctcgtggtgacaggggaggctgggagcaggtgctctttctatctaggggcaccttctctggcccctttctcctgtgactgcccaggaggggctcagggcacaggctcagtccaagcaagctgctggacaccacctgctgcccggccatgagtgccaactgcggttggttctgcctcacttggctggaataatcacgctctggttaatctttcagagacctgggttgtcaccacggagtttctcattagcaagcagctcaggttaaatcaaggtcttgttatagcaactggagatctcattcacccactttcctttggctcagggagcggacaggtgctgggccctttggccctgctgccttgtggggaggctgcaatttgactttgttgggtatctgagccacagtggagatgggagaattctctcctccaagaaagaacaatcccttaggagggtcccagggctgcctcagggtttgaggtggaaagaagtgaacagtaggcttcactcccaagcccctaagtagcagactgagttcccccaaataacagctgggcggcagctgcccaaaggtctgggcaaacctggccttcctggtagccatagtaaaggtaacaaccctacccttgagggtaacccttcatttcctcactggtcctgcaactctctgtggagaggggttatttttcctctgtgaagacttgaaaccaagagatcttccatgagccagtggcagagttcgtagctgagctcaagctttccagagatgacctgtccagcgcatttttgtttgaacttgcatacaatttccttctaaaggttggggctgttactgaaacattactggacattgcccagctttcaaagacagagtgcccaaggagtttggtccctccctggggttcctggctcttctgttttcaggcttactcctgctcaacatatttggttttccacaacctgctttttttccttaggggtagagggaatgatggaagagcagtggcttggcctctgaaattgcctgacgtctggcagcaggaattcactggtctagttggtggacgataaagggcaattaactagccatcatttgttgagaacttaccattgccattccttatgccaagtgttttacctgcattatctcacttaatgccccagcgtaggaggcaattcctgctaaccccattgggatgcagggctctgtgagacaagggtggtttccaggatgatctgtattggctggggtaggagtgatcaggaaagggtgtcagggagctgtgaggccctcttaccttagctgtgtcctgattaaaaagtaaaaatatgtttgcttttttcctccttattatcatggttacatgtgtttactgctgaaaacttagtgaaaagaagaaagtgaaaatcacttgtaatctgacttcccagggagaccactgttaactttctgatttatatcctcccaggcttatttccacacctatttctgtgtgtgtgtgtgtgtgtgtgtgtgtgtgtgtgtgtgtgtgcctgtgtgtatttaggggtcaaatttcaacacaattgagatcaagtttgtatggacaattttgtaacccatatgttttccttagtggcctgatgtgaatatttccttgcattggtccatgttcttctattagattaatctgcctgccagatctgggaagctgaggagggttcaggcccagcagggagtggatcttcctgcccagccatggcctcagggctgagtctgatgggtatcagggaaggctgctgcttgaacaagtgactgtgacctgagtgtgcaggaggcagacaggagcctgggtggggtgggaagccacctgctcttattcgtgcaggctcctctcacatctctctaaggatgcttatgagagcatttgagaaattctctcctgtttcctgcactggctctgtttccctgggtgccatttgtcgtggtgcccctctttcaggctgctgattttctttatccactgtgatcttcactgatctgcttatgagcaaagattcctatcagtggtttccaaacccagccaaatatcagaagcatgtggggagcctgttaaaaatacacagattcctagaatcttcttctggagactctagtttaataggtctggggtggagcctgagaatatgaacacttaagaagccatagagcgttcagactgtcatccaggtttggaagctatggattcagagtcagttttggtagcaattgggaccacttttactgtgaaggttttggctaagtttttctcagttcactggcctttccttagcaaagtaggtagcccctggccttctactgtgagctttgccttggtagaaccagatgaagatgttgcttagctggtagtttcctgagcacagacatgtaaagggagcataatcatctatggaaatataaagagacaaaactgttttgatgagaattcccttcggggagagtactgcatgatatatgtatttgtgtgtacacatgaacacaaccccttgtcccccaaaaggagtatgttcaagtgacattaattgaaggacactgcgttctgaggaggtggccttacttcaggggaagggagtaggcaagctgaggctaggacccaactactctagagggatttttttttctttattgtgaaaaatgatgtaatttgaagtcattgtaggtatacataatatttttctccaggattgtatattttattttgattaggatatttgctgatttttcttgtaacagctttattgaaatataattcagatatatacaattcactcatttaaaccatacaattcaatggtttttagtatattcacagagatgtgtaactattatcacaatttcagaacattttcattccctcaaaaagagacattatgctctttagcttgtaccgtcctcccttgtcccgagcccaaagcaattgctaatctattctctccctctgtagatttgcctgttctggacatttcatataaatggaatcgtatttttttttttatgactgacttctttcacttagcataatgttttcaagtttaatccatgttgtagcagatatcatactccattcatttttatggctgagtagtattcattgtatggctataccacattttaaaaatttattcatctggtgatgaatattttggctgtttctcccttttgactattatgaataatactgccatgaacatttgtgaacaagtttttgtgtggacaaatgttttcatttctcttcatatacacacagtatatacctaggagtagatttgctgagtcctatggtaactctgtgtttaactatttagggaactaccaaactcttttccaaagtaggtgtatcattttatgttcccatcagctgtgtatatgggttttggtttttccacattccttaccaacacttgttattatctgactttttaattctagctatcctagtgggtgtgaattgatattcactatagtttcgatttgcattttcctgatgacccgtgatgttgaacattttttcatgtgctcattatttatatatcttctttggagaagaatgtattcagatcttttgttcattttaaaattgggctttttgtcttgttattattgagttgtaagatttctttatatattctagatgcaagctccttaaccgatatatgatttgcaaatattttctctctatctgtgggtttttttcactttcttgatagtgttcattgaatcccaaactttttttggggatggggtcttgttttgttgcccaggctggagttcagtggcatgatcatggctcctctttgaccatgcagcctcaacctcctgtgcttaagcgatcctcccacttcagcctcctgagtagctggtactacagatgtgcaccaccatgcctggctaatttttcttatgtaaaaaaaactttttgtagagatgaggtttccctatgttgcccaagctagtcttgaactcagggactcaagcgatctcctgccttggcctcccaaagtgctgggattataggcatgaaccactgtgtccagccagaaccccaaacatttttaattttgatgaagttcaatttactttatcttttgttacttgtactttgtgttatatctcagaattcactgccaaatctaaggttctgtcagttaccaagagatttacctgtatgttttcttctaagagttttatagttttggctcttatatttaggtctttgatccactttgagttaatttttgtgtatggtatgaggtaagagttcaacttcattgttttttgtggctatccagttgtcccagtaccatttgttgaaaataccattatttctctattggatgatcttggtacctttactgaaaatcaattgcccataaacccacggcttatttctaggctttcaattctattccattgatctatctgcctattatcattccagtatcatactgtcttgattactgttgctttgtagtacattttgaaatcaggttgtgtaaatcctccaattttgttcttctctttcaagatcattttggctgtcctgggtcccttgaatttccatatgaattttaggcataatattttatatagaaaataaaaaaactcaagttcacaaaaatgttggatagatagttttaaaatatcatcttgaagggataccaacttattagtttgactgatgaagcaaattattaatttacctggggtctctgaaccaaattttaacttgcttgggatctctagtcacctggatatggtgagtggtcaggagagagaacaggttgccttttctgcagggtatctgggtctggagatggtgggcaagctggacatgttctgaggtctgcaggtggctgtggacattgggtgacaaaatgcacctctctttagaaatgccagccccctatgaacctacaaaatgaaagctgtcgggagcagctctaaatgtaggctcgagaggactgcctggagtcactgatttgccatagggaagttgggaagatgtggttctggaggcagagtagacttaggagtgtcattgatttgctcagcattttttttttttttttttttttgcctcatgtttgttgtgttggtacaatgttagctggggcctgtttcactcctttctctgcctctctttagaagccgtggagataaataattcattttctgtagtgagagtgaagcttgggaacagatgtcagccagctgcgtggtgtgttgggcagtgcacggtcaggccctgaactggaggccttcaatgtgtccctgccagctgcccctggctggcacgtgtttccagtcccactgctctgagcctgggagattccctggcatggttggggaaacctatccaactgtttctcaggagctcatcatttgctggtcatactcctcagcatttattggcttttctgtcattcagagtccaactgctcaggagctttcagaaattcctcaaagtttctggcccatagatagccctttgtcctcttttcccattctgctttgtgtgttcttcttaaacatttaaaaaagtttgaaatattatacagacagacagaaaagtgtccccccaataatgtgcaatccagtgacttctcacaaaaaaaaaacctttgtaactttcaccagagtcaaaaattgaacatttctagtatttagaagacgcatgttgataatgcagtttttttctttatcatttacttcaaaatattttctaattttcattgtcatttctttttcaatccttgggttagttagaagtatatttctaaatttctaaatattggggattttctggtaatatttttatatttactttgcattttagtcagagaatatactctccatccttttaattccttgaaattaatcaaaatttacttgatgcctcagcatatagttgtttttttttttttttgtcgttgttgttttgagactgagtcttactctgtcaccaggctggagtgcagtggcgcaatgtaaactcactgcagcctccccttcctggattcaagcaattctcctggctcagtctcccatgtagctgggattacaggcacccactaccatgcctggctaatttttgtatttttagtagagatggggttttaccatgttggccacactggtctcgaactcctgacctcaggtgatccacctgccttggcctcccaaagagtcaatttttataaatgttctttgtgtatttgaaaaggattctgcagcagttgggtgcagtgttctttgtgtatgtcaagtttaggtcaagtttgctctttatattgttcaaatattccgtatccttgttgatttttcctgttttctctgtcagttcctaagagaggtgtattagaattcccactgtgattgtaaatttgtctatttcccattgcagttctgtcagtttttcctttacatatgttgaagctatgttaacaacatacagatttagaattattatctttctggtgagctgaaatttttattatgaaatctattattgttatgaagtcttctttatttctagtaggtataaagtctaattttcctgatattaacatagctaaccatgcttctttcatttaatatttgcctgacatatctttttccatcctttttctttcaacctttttggatctacattgtaggtgtgctgtgtctgctgcaaagaacaggcacatggctgggagtggtgagtggcccatgcttataatcccagcactttgggaggccaaggcaggaggatcactcaagcccagaagttcgagaccagtgtgggcaacatagtgagagctcatctctacaaaaaataaaaaaattagctgggcatgatggtgtgcacctgtggtcctagctacttgggaggctgaggaaggaggatcacttgagcctaggaggtcaagactacagtgagctgtgattgtgatactgtaccctagcctgggtgtcagagtgagaccctgactcaaaacaaacaaacaacaaacaaacagtataggcagagagttgttgttattattattattttcttctcaatgcagacctaggatgatattttccttcaaaaaatctttgttcgtttgtcaggtgcctagggtcactgggttagtcttaattcagtgttgggactgagagtacttgaaatcgagctgtagtccctggagtagctgtgtctgattacagttcactctattcctatggagcaacccttcagggtccctatgcaaaaggtggggctcagaagaaccctgcttcttggtgggccctggtccctagttcctattcctctagccctgagaagcaggcagaaactcactcagtctcttgatctctcaatcagccctctggaatttgaaaacaccccaggaggaaattagcccagaaaaacactaggtttccttctacagtcctccattcccctagatcctgcctggtagctcctctctctcttgttgtttatctaagaagatgctttaacatattttgtttagcatttctagttttcctcagtggatctgtcatcccagaaatggaagtcccctacatatattttctaagcttttttgagttggtttttgtttttttttccctccctttctgcctctctccctccttttctcctccctccctgcctcttccgtcccttcctcccctccccgctctctctctccgtccctcctttctttctccctgcctgcctgcctacctgcagttgtccgagcaggcattactggggctggagggtccctttccaagatggctcattcacatggctctcagcaggaggcctcagttccttgctacctgtaattaggaggcttctgtttctcatcgcatggacctcttcgtaggattgcttgagcttccttattatgtggcagctggcttccttctaggcaagtgatacaaaaatgaaagcaagaaagaactcccataaaaagatgagtaacccagctcaaaaatgggtaaaggatttgaatagacatttttttccaaagaaaaatggctaacagcatgtgaaaaaatgctcaatgtcattagttatcagggaaatgcaaatcaaaaccacaatgagatactatcatactagaatgactataataaaaaaagagccaataacaggcgttgaagaagttgaggggaaattggaacccttgtacactgccggccggaatgtcaaatggtgcaaccactttggaaaagtttggcggttcctcaaacaattaaatgtagagtttccatttgacccagcaattccactcttaggtataaatccaagaggaatgaaaacacatgctcacacaaacatgtgtacacacacacatgttcataacggcattattcatagtagccaaaaagtcgaaataacctgaaatatccatcaccagatgagtggataaacaaaatgtggtatatccatacaatggaatattatttggccacaaagggactaaaatactgatacgtgctacaatatgggtgaaccttgaaaacattatgctaagtgaaagaagtcaatcacaaaagaccatgcgttgtgtgattctgtttacataagtatccagaataggcaagtccttagagacagaaagcagattagtggttgacaagggctgaggggagaagggaatagggtgtgactgcgaaagagtatgggatttcttttaggggaggatgaaaatgttctaaaattagatagaggtgattgattacagaatcctgtgaatatactaaaagaaaattacatgctttaaattggtgaagtgtggccgtgcacggtggctcaatcccagcactttgggaggctgaggcgggtggatcatctaaggtcaggagttcgagagcagcctggccaacatggtgaaactctgtctctacaaaaaatacaaaaaattggccaggtgtgggtggtgcatgcctgtaatcccagctactcaggaggctgagacaggagaataatttgaacctgggaggcagaggttacagtgagctgagatcatgtcattgcactccagcctgggcgacagagtgagactccatctcaataataaacaaaactgatgaaatgtatgatatgttaattatatcccaatacagctgttaaaaaaagaaggaactaataatacctttaatatcctaatgttgaaagtcatccactgtcatttctaccacattctatttgttagaagcaagtcactaagtccagcccatgtctgaagggaggaactaggcttcacctcttgaaaggaagagtatcaaagactttgtggacaaattttaaacccatgataggtatagagaggctaacagtgggggccctggactgcctaaatgcaaaccccagctctgccacttactggctgtgtgatttggacaacctgttttagctattttcttttttttgagttggggtctcactctgttgcccaggctggagtgcagtggtgtgatcatggctcactacagcctcaacctcctgggctccagtgatcctcccacctcagcctcctgagtagctgggactacaggtacacaccaccacgtccggctaattttaaaaaaacgtttttggagagacagagtcttgctatgttgcctagactggtctcaaactcctggcctcaagtgatcatcctgcctcagcctcccaaagtgttgggattacaggtgtgagccaccatgcccagccaacctgtttacctcttaataatcttcagcttccttgcctgtaaattgggataaaagtagtaaccatttcacggagttattgtgaggagtaaaagaaataaaaagcttatagtaaagtgctgagtacctagtaaacatctaagaaacattgactttgttctctccatgtgtgtgcctagcctggtagttcactatggccctgaactctgggttgagatgtgtgtgaatcctgtaggatgtttggatctgagccccacaggactgctagtggtgttatgatccagccaagattagatgctgactgcagtagattcaggagttttattttaccagcttgcccaggacggacctagaatcccttgtgagtgatccatgggaatctaaattatcaagagactgaatgctaatttattagtttatgctgaaaaatagaatttctgagtagactagaagacttatgctggccggagcaatctctttctgtaaggaaaaagagcttgggaaactacattaatatcagctttcacaggaagcagagaggccaggggattgaactgacccatcacaatttttatgccagtgctgtgtgtcctatgtcctcaccttcgcaaaccagggccacttttttgaatggaactcagggttctccttcttttaacacagtagccatgggaaattctcctgggttatgtccatagagctgtgtggctgcctgtttcccagcgccactgcagcctaccatttctcccttagatcaagcaggcagtgaaattggtaaacacatgcttaaccatttctgagcctggatcagggctggggtgtggatgaggcagctgaagaccacagagagagggcgtgcctggcatctggctgggcaccctccctcctgcgaggaagacttgagtacagacgtgtcctcataaacggaggggaaatctgtggatgttagcggctggctaggctccatgtagacccaactgccttcatatgtttgtctggatatcatcacccttcctgtagcttttaacatgtgacagttcttaaatgggcagcggcttctggggtgaattggattttaggatgcctgctgcttcatgctagccaggcaagtccatcatagatgtattctctgcacatctcagggtggcatgggctcccactgggacacattccggctgatccctgagtctagcaaaggtgtgcagtccccatctacttcctttattttctgagtatgtctctttctgactgtggcctgtgggttagagttcatctgtggttctctactgagtattgtctgccagactgaatttctttagctggtgtccacatccatttaaaagtgcccagtaagtctgagcccttcaagtcctgtgcccagcagaatttgggtttgttgccttttccaggctttctgaagctcattcccatccagtatttttcctgccatatggggccctgtctattctccctttggctctgggccctggtacacacttgcagcctctctgggcatccatcaccaccaccttttgcacatagtgttggtgcccaactgcgatctcatgggaacaggggacatgccctgtccaaaggccctgcccaacctcgatgaggatgacttcaagccctttagcctgactgctccctgagtctagggaggaatggggagtgttgaaaaaaacagaggtgtaggagcaagaatattattgggaaaagttttaggtttttgttttttgagacagggtctggctctatcatccaggctggagtacagtcgtgcaatcatagctcactacaacttcaacctcttgggctcaaggaatcctcctgcctcaacctcccaagtagctgagactacaggcacgcaccacggtgcccggctatttttttaattaattttttgtagagaagggctcttgctgtattgtccaggttggtgtcaaactcctggactcaagcaatcctcccacctcagcctcccaaagtgctgggattacaggcatgagcgaccacaccccacaaagacaagtttttaaaggaacaagcaaatttcagaacaatacatagggtatgtatctgtggagggaggttgggtggggggggtgttctgaaaggatgccaaattagctggtgcttcggtgagctgaagactccagggattcagccctacttccccttcacctggaggtttctttctctagattggagacatttctaggaggctgccctctattttttttctttttcttttttttcctttgagacaggtctcacgctgttccccaaggtccaggctggagttgcagtggtgtgatcatggttcactgtgggctcaacctcctggattcaagtggtcctcccacctcagcctcccaagcagctgggactataggatgtgccactatgctcagctaacctcttggtttcttgagaaaagctgtggcacctggtgctgtccccgatggttctctctacctctgaatctgaaggttgtgttggcaaacgcagtgggcacagcagaggaggtgcgtgctagagggctgtgggtgttccagaagactgtgcacaggaaagagtgctggagtgggggtagagttctaatctccagctctggattctctgggcccagagcaaatcaccttccatctcaggcatgaccgttctggctacaaaatgaggagactggacaagatgacttcaggggcctgtgtgtcagacatttggtggagtagcatgatggggggaaggaggggacaggcatggccgagggagggatcttgtgaactggggcaggtgtgtcctggcctggggagcctggagtctggtctgctgggtttggtttctctgctgtaacagggtacagggcaccctggccttcctgagaagcccctggctggcagggcctggaacgggagcagtgcagtgtggtgcaaactcatctcaatcccgagtcagcctttgcccctgggcctttgtcagcctccagcttctcacttggccttgcccaagtccctgtcctagccactgggctgtgagccctgtgagggcaggcacctgcccagcctcgtgcagatgcccagcaaatatttgctaaatggaattagtgaccatttgtgtctggagatttcctgatcctgacttctgggcaaagggccactgttagttaggtgataggtgttgtggagcacaggggttcctgtggctttcggatccaagcatgtttgtgccagagctggctttgcacaggtagtagtttcagaaaaaatgtttcatgttaaacataggtgtctttgagttggtgaaattcaacccatgactgcgggcttcgtttgcctgtttccaaacctctctctctcccaccccacactagattgggcacagttttcataggtttctcagctctaggaagccacaatgaagtaattgctcagactttgagataatgataccgtcagttctcccggcgcctttcatccaaggagtcctcctcacctgccagcattatctgatcacagcttggagagtgccataacccctgttattagctctacctcacatccatggccactgtggtcctgaaagaagagggcagttagggctggaactgaaacaggattcctgggcttctgagatctgggtcctggacaggagaacagcagatatttctgatggatgacgggctggaccagggtttgcaggagcctgaattgcttgggactgaagcttaaccaccagaagtatgagggtcaagtgatgtctgggtcacagtgattggtggacttatgcagagttaggagacatgaagggttctccaaacctgttctctaaccagaaacaaagcaaagccccagctgccagcctagtttcaagaggcatgtccagagctggccagatgggatgatgaggggatgtctcactgtgctgtgagggattgtggaaggactttggagttcaggtctagaggaaagagcccagagaatgcagaactagatccgggcaatgaaagttaccgagaggccactgttggcttaatataagatgcagcattgaacaatcagagctctttcaaaagggaaagggctcccaccacaggaagcaagctccccattgctacaggtgactgggcagagggagggcacagctagccagggttgtcacagatggagccatgcctgggctttctggtagacggccctgccctgctttctgatgtctccagtgcctgtccatggggtggactgagttcagcagctttttgaggtcccagggaaagtctactggactgagagaaacattttcgatgtcaccgaggaagaggagtgtgaccctctctctcttctctgtcttggctggaggccattgggtatctgtgaggatgacctgaagttttgtcctgttttttctttttttaaaaaatttaaacaaaaatgggaaaagccaggggataaacctcacccggccactcattcttgccctgccttccagccccgtccttctgttctctttacatgtcccctccctccctgttctcctcccttcctccctgctctttctcttcctcccctcctttctcctgcctctttccttcttcctttgtttcctctttcctttctttttaattatagaagtgctatagttcgtggatatatttgaattattaaaacaacaattgtgatagattgaaattcctcttgactaccctcctccaattcctagtctgttctctagcagggatcactgtttttaatttggcatcctttcagaaccctccctcccccgccagatacataccctatgtattgttctgaaatttgcttgttcctttaaaaactcgtctttgtggggcgtggtggctcatacctgtaatcccagaactttgggaggctgaggtgggaggatcacttgagcccaggagtttgagaccaagctggataacacagcaagaccccttctgtacaaaaaattaattaaaaaatagctgggcaccgtggttcatgcctgtagtctcagctgcttgggaggttgaggcagaaggattgcttgagcccaggaggttgaagctgtagtgagctatgattgcacgactgcactccagcctggatgatagagccagaccctgtctcaaaaacaaaacaaaacaaaacaaaaacctaaaacttttctcaataatattcctctgccaggttgtatggtgctcctccattctttataacagctcatactattccatatacagctatagatggtttacttcactatttctatattgatgaacatttcaggtgtttccagtttttccttaaacaatgctgtagtgccagcctttgtgtgcacgtgcttgtgtttgtctacgacagtgacctggaatgaagacttttaggtggaagaatatgcacatttaaatttcagtagatcttggcagaaattaccctccattttcactccttccaacagagaatgacagtacttgttctcctacacctttaccaacatttgacaacgacccagcagtgagatttcccagcatccacctggctgcctgtacagtagtgagctccccatcaccagaggggcacaagcaaggctagagaaccactgctggaggcattcgaaagggactcccgatgtggtgggcggggctgaaccctgtggcttctgaggtccctgccagccagagacttgtgtgagtctttgaatggcttcacatgaacaaaagagcatttctgtcacctttcctctagttttttccaccacacccaccagggagctgaggcaaggttgtttctgttgctgtttccttaggtcagctgaggctgtccattgatgcccaggaccgggttctgctgcttcacagtgagtacggctttgtgcaggctcaccaaggaaggggcgggccactcagcttgctgcctggggctggggttgggggatggtggcaccatgggccaaggcttcttttctcatccttgtataaaggatgtgtccattgataaaagccagtattcacctggggctctttctatagagcagccctggtcctgccttggatgtgtctggagtccacatggtagacctttctcattgacaggctacagctgcccctgggtacctcaacttccttcttggccccagcagagcagggccacagaagagttttcctatcttccctcccttctttattccatcctttcttcttttctctatttttctcactcattcatttattcattggttgacaggcagcatagtatcatggttaagatcatagtctttggagccagaccactataatttgaaccctggctctgatacttgttgagtggccttgaacaagctccgttttctcatctgtcaagtagtggtggtaatactatgtatcttacaggttgctacaaagattaagtgagttactgttagtaaagtgcttagaacagtgctgaacttgtagtcaatcctgtgtaagtttttgttagataaaatagaaaactggctgggcacggtgactcatgcctgtaaacccagcactttgggaggccgaggcgggcagatcacgcggtcaggagttcaagaccggcctggccaacatactgaaaccccgtctctaccaaaaatacaaaaaaattagccgggtgtggtggcagatgcctataatcccagctacttgggaggctggggtaggagaattgctagaacccaggaggtggaggttgcagtgagccaagatcatgccattgcactccagcccaggcgacagtacgagactccgtctcaaaaaaaaaaaaaaaaaaaagaaaaccatacattccaaaaatagcgattgagcattagctctgtgctaggggctgggaacaccaaggagaagcacccacccctgtctagatggtgttgatgggatgccagggaagacttggcggagggggtgatgcccacacggtatcctgaaggaggaatgggcctgagccaggcaaagaggagcagggagggtgtggctagcacttcatgcacagggctagcaagtgcaaaggcctgggggtcagagagagcaggatgcatttgaagagctgtctagcatggctggagcacagcacaggaagagttcatactccacctgtttgtctgtccatgtgtccatccttccatccggcacatgaatagttacatgagttgctgtcatggcccccactgccaggactcttctgtttagcccagaaggccctgtctatctctccagcctccctggctcttgccgctgacggtaccctccacctccagctctatccagttacatgcactcccttgaatacatcttgcttgctcctgcctctgtgcctttgcacctgctgttcactgtgcctggaataacctttcttttgttttgaaccccttttgaaaaataactctccacctgctctgattttgcaagaaatatgcctgccttcatcatcattaagactcaggaaggaagggtcattttgccttattatttccccctccaggaatcatccccctgacccacctgtctgggctgggtttattgctttctcctttgtgtctttgtcacagccctgactatactgtgccacctgtgtctggcctctctgccagactgagaatgcaatgaggacagggactgggtgtggttcattgtcactgctggccagagagacccaggaggtcaccagacctgggtcctgccctcaagaaccacgccctcgagggaaatgatgcacacaggaacagtaaccaggatactgggcagagtagactagtaggcgcctgggtcctctggtcatggccatggggggcccaacgtgaagttcccaaggagcagcagaggggtgttctctgcctgccagggcctgactccagctgtgcaaacagtttttgcaaaatgcatcttggcctccaccactccatttgtcctgcacagtttgctttggcttcaccccagtctcaggcccttcatcccttcccaccggtccccactccttccattggtttcccaggccttgcacctcagactactgggagcactgtctgagccaaaccctagggctcaatgaaaaccagacgtaaggctgggtgcattggctcacgcctgtaatcccagcactttgggaggctgaggcgggccaatcacctgaggtcgggagttcgagaccagcctgactaacatggagaaaccttctctccacgaaaaatacaaaattagccgggtgtggtggcacaagcctgtaatccccgctacttggcaggctgaggcaggagaatcacttgaacccgggaggtggaggttgcagtgagccgagatcgtgccattgcactccagcctaggcaacaagtgcgaaactccatctcaaaaaaaaaaaaaacaaaaaaaacaagaaacaaacaaacaaaaaaatccagacgtaaaagaaaatagaactgaggctcaggttctatcaggtctattgtcttctttctatagacctcaggcaaatggtgctgcctactcttgtgaccacacctgcacccaccccacacctctccccttgcctttatttattattatttttctttagcaaacattttttgagcaattacttatttgccaggcactcctctgagcacttcaggcacattacctcatttaattggaacaactaccatgtgaagtgcatgttattatcactaaaccattaaaaatggcaaattctgtcccatgcaaagcaactcactctagcttatatggtgagtaagcggtgcagctgggattcatgcctgggtccgtccacccctgaggccccagcttgtgactcctgtgctgtgctgtccgccagccacagcacggctcacggcacaccgtgagtgccacggcatggctcatggcacatggtgagtggccccttcattcctagaaggcagtcttgtgtggtagagcactgagccgggagtcaagagacatgggttccaaatccagcggtcattcccattgttctgtgattgtgggcaagtttcttactatcttgggttcccctcgaagcctcattttccccattacatgaagggttagattctataaactgtagttctcttccagctgtaagattcagggaattgaatgtacctcgtaatgcattggtgagggtgctgccagagagtggaagatggtgggaatggcctagaccagagcaggttcatagccaatggtggttatgcagattaagggcctagtagcaggggccatagccctgctactcacagatacgcttttcttttcaggtctctttattcgtgtggatggatatgtctatgtgtgtctctctttctcgctgtgtgtgtgtgtatgtttccattcatccaccccaatgtctgaattctcttttagttatagaaggtaaaggcctgatcagcaaacagcctggcacctgtgatccgtatgtgaaggtatgtggtggggccggagatggagagtgggatattgaggggccatgttactgggctcagtcccaaggtcccagcacacctgtggggctggtgacctttgaggaggcagttgccatctcactcatcttctcaataggcatttattgggcccagtgctgggacaaacccattcccttagctcggctgggtccctggggcttcctgcaacagccaaaatcttaagggcgatcttggtcatctatataggtgggcagtgagtatgtggatggctgaaatccacaggtaatcccaagacctcttgtgaaaagcaccgttttcacccactttccccccaaactaggggcaggatggccagatttgggcagtagagtggagggagtgtctctgagggctggaagatccttctgggttgggcttttgctgtaaagacagggtccttataggggtggggctctactttcagtgagagccaaaggccaggagcttcctaaagtgtggcagctggggttccaggtgctggccctcagcattcttcctgaagccttcaggctgatcagaagcccctgctggcaaggaatttatcaggagcagggctagaacagccctgggttgagaacatggatttggggccttggcagaggctgacctggagccttcgtgaagggagcactcagcagctgctgggaccttagaagagaggagtcctttcgcttctggggaaaccactctgcttgggggaagagcagagatgataaagttgtaccccagctctggctgggccgtggctgcctttttggtaccacccaccatgaggccctgtcctggcatctgcctccaatgtctcttgccctgggctccttgttcccttgcagcatctgacaggggactctattctgtcctctgcagaggctgacttgaaggaccctgggaagcctttaacttggagatgtgcagagtcagctgctgggcttaggtgggccatgagatccgctaatcatgcttccttttttccaattcaagatttctttgatccctgaagatagtagactacgccaccagaagacgcagaccgttccagactgcagagacccggctttccacgagcacttcttcttgtaagagtctggtgcagctgggccctagaaaggagagggaaggagtgtttatctggaaacagctctgtttgccaaatctagaactagatctatgcaaaaaaaaaaaaaaaaaaaaaaccaaaacaaaaaaaaccagtgccttctaaaggatgtctttgttttctcactcacttgtgtccttgcatccctggcaccaggcccagcagcgaggtccacagtgataaggtatcacttggctagctctcataactaaaatgcccagcctggggctggcagcccataaaaagtgtaggcaatttcccactgtgccttgggccaagctttctcctttagccgaaggaattttccaagctgaaggatgttttgcctccctgcccccctttttacttcaactttctaacctctctgagccttggcttccttatttgtaaaatggggctaataatagtagcaacctcagagagctgtggggtataaatgggacagtataacataacacagggtaccagctattattgttattatttctttccccaatctctgaactctggggccaatgggaaggtaatgtacattttgtattttcctattagtgaaaattaatattttggtttttctcttactacataaagtagttttggttatgataggaaaatagaaaatatagatgagtaaaaagaagaaaatagaaaacacctatagccctcctactcacagatacgccctactgtatttcttttcagaccttttaaggtccttttcagaccttttcagaccttttaatgtgtatgtttgcgtgtgggtgtgtatgtttgcatgtgtgtgtgtatatgtctgtgtgtgtatgtttacaaaaatggaatttttttttttgagatggagtcttgctctgtcacccaggctggagtgcagtggcacaatctcggctcactgtaagctccgcctcctgggttcacgccattctcctgcctcagcctctggagtagctgggactacaggcgcctgccgccatgcctggctaattttttttgtatttttagtagagacggggtttcaccgtgttagccaggatggtctcgatctcctgacctcatgatccgcccacctctgtctcccaaagtgctgggattacaggcatgagccactgtgcccggcccgaaaatggaattattttataatagcatgttgtaacctcctttttgtccttaacaacataatataaactgttttatgcatggaggtagtcatctcttactttatttgtaatatagtttatttaaccagctgttgacgttacttccacatttttggaattatgactgactctatgagtcagctatggcctggagctcagcccttactaacactccgatggtctgattgatttcgcagtcctgtccaagaggaggatgatcagaagcgtctcttggttactgtgtggaacagggccagccagtccaggtgaggagagctgctgagctggagggggactctgctctgggctagtgggtgacagccaggtggccagcatacaccaggggttcgattagtgctttctggataaatgagtgatagtggcaatactaaattgcagaggctgcccctccttgagtctccatcattccaggtgttaccaaggactgtgttatcaatgagcatttgctgagcactcggtatcaaacaaggcactgtgctggtcactggggaagccgaccagcctacacatggaaatttattctcaaggtgtccactgttcacgtggggacaccaggcactgcatggagagaaattacaataacaacatgtacgtgctcagttctacaggactctaagcaccttgaaaaacaggactatttcttttttagtcatcacagtacctagtgcctggcatatagatgtttattagatattggctgcatgaagaaaagaatgacatgagtaataaaggccatcagtatgggaagagggagagttcactgtggtctgagatgatcaaggaaggcttcatggaaaaagtggaattttgaacttgggcacagatgaagaataagacaactaaagaagaaggttggaaatggcattccaggcagggcaaagcatgagcaaaggcaaggaggcagaaatactcactgtaagctaaggctgccatgatgaggccaggtaagggagtatagaagttttgtgtaggagaatccaaacaggctgatcttgcaggcagtgcaggacacaggagggctgaagtggccattagtgacggcagttagagcggagcaggggaggagtgccgggcaggtgagcatgagaattggctgttgagtgacagcaatgcactgccatggcccactgttagcggcagtggctcatttggctggtgcagcctaaggaatctgggataccccatggtcagtatcatttgcggagcaatcacatcactgaatggtgactgaaaaggggcttccgtgaatgaaaatcagctcaagtcaccagctgagacctggaaaacatttttgggttcaatgctctttagtactctaaatgttattagctaatatgttttttaaaatcggggtgtatttaacatacaaaacgaaggatttctcttttaataaagtatccacttttcatcctagggtagtatagtacaataaacctcattcattcattcatccagctgccatttcctgggtatcactgtggcaacaacatgctggggatgcatgcatagggtcaaagactttcctatcggatcaccgatagagacttggagctgagagtgaggagggggacgtcatgttaataacaatagcaattgctgactgggtgctgacctggagccaggggttaacagtgcattgtctcatttaattcttttttttttttttttttttttgagacggagtctcgctctgtcgcccaggccggactgcggactgcagtggcgcaatctcggctcactgcaagctccgcttcccgggttcacgccattctcctgcctcagcctcccgagtagctgggactacaggcgcccgccaccgcgcccggctaattttttgtatttttagtagagacggggtttcaccttgttagccaggatggtctcgatctcctgacctcatgatccacccgcctcggcctcccaaagtgctgggattacaggcgtgagccaccgcgcccggcctgtctcatttaattcttacaacagctctaagaagagtgtggttttgtcctaagttttcagaagaggaaactaaagtttagagaggttaggaatttgcctaaggtcatacagccagttaacaatagagccgggatggaatccaggtggttggaccccagggtctttcctctcaacactgtactgactcatgggtggacaggtgaaaggacagaagaaagagccagtaaagtagagagggaagggcagggcaagagtggagtgaggagggatctgcaaactcattgacgttgctggaaggttaagtacaaagtagggactggctaaagattagctgaagaggttggtataagccaagtcagatgattctgtagattctctttggagtatggggtttctcctaagggccggtggttctcgatcctggatatacatcagaattccttgggatgcttgtcaggaacctagattcttaggtgccgcgtcagattaattacatccaactcttcatgggcagggctgagaaatctgcatttaaacatgtttgcagggtgaacctcctgcagtcactttggtgtttgggaatgtctggccattgggagatactgaagtgtgtcaagccagggaatgatggatgcacattctagatctatcactttggtaggtctttggaaggttgaggtgagagagaggctttggggctagggaggggaaaacagactcaggccatatttaggagattaaatcagtagtgcttagtggtgatttggctgtgagagcagtgtgagaagtcaagggtaactcctgggcggctggtggtgtctccacctaagacagagttactggaggtggaggtgagtcagcttgggatacggtgagatgcaggtgcttggaggggagccaggtcagagctgtgaagtagggctcacctttgcctacctggaacttggaagacagagatatgggagccatgagcaggaaggcagtgggtgaaattctgagcaagtgagattgtcaaggaaggtcatcgaatgctaaggaccaagggtccgctccctgtctttgaagggacaggccaatgaagggaaggtcctgaaggagacagcagagtgtcagagaggcatatggacgcccagaaagccctttgggtggaggcagacaccaaactgctggagaaggagccggtcatgcccttcatggcttttggaaaagaaaatgaggccagggaaagtgagtcagcgtcatggggcagtgtctccacgtgttgcctattttgggaaagtgagatgccttattaaacaaactacagccaaactcacggtcacagtcccagcccgaagctcaggaggatcagggccttgggagcagagggccctgtgaagctgtgagcagcacgcaggccggcctggcctccttgcgctctccttttcctctctcctttatcgatccatttcggagcgagaaggcctctgagctggaggaggcagacagagtgattgcaggaaacttcggctctgctgaatgctctcaaatcaaattgtgcctctctgaaggatggacattcaacttatcaacatgaaagacaattgtggaaggaaggaaacaaacatttatggaattcttctctgtgccaagcactttacatacattatctcattttatcctcatcatgatcctaagaggtaggacttattattgcccctctcttcagagaagaggaaactgaggcttatgaaagccgaggcacttgcttgaggttatgtaacagctcatatttaccaagcacttactgtgtgtggacattaagcacatggcactcgttctccaatttaaccctcacaacaacataagaggtaggtattattatttttgctcttttataggtgaggaaacaggcacagaggcgttacataacttgcctaaggtaacacagatagggtgccgtgaaaacaagatgtaaatgcaggcaagctgacgccaagtccaggttctcgcagctacattacggtacacttgaccatctcacatggatgataaatgactccaaagcatactctttctgtgtcagtatgcttgctcctcaggactcagggtgcttctctttgcatttatagtgtagtttcattgattgattgagacaggatctcactctgtcacccaggctagagtgcagtggtgtgattagagcttactgcagccttgaactcctgggctctaatgaccctccagcctcagcctcctgagtagctgggactacaggtacatgccaccacacccagctacttaattttttttttttttttgtagagacgatgccttgctatgttgcccaggctggtctccaactcctggctgcaagtgctccttctgcctcagcctcctaaagtgctaggattacagacatgagctaccgcagaatttataatggagttttatgtaaattattcagccaaatgtgtggtggtcacattttgaaactgataggagataacaggaaagcatctgtttcactaattctcacgatccttccagggatggctgtgaacttgtgttagagaaacaagatgatctacaaagaagttctggggaagggccagatgatttcagttcatcatggtgatcacagtgggaactgaggagaaccaggcctcagcacagtagattttggcttagctttgactagctgtatgaccatgggtcagtcccttccctgcgctgagcctcaatttccttgtctgtaaaatgcagtgatcactaatgtttctttcagcttcaagtttctgggagttttttataggcactttcaaatgtgtgcagaggtagaaagtatcatataataaaccctcatatactcatagcggagtttcatcaattatcaatatatggccaatcttatttcatttacaccccatccactttccccttctccagtgaattattttaaagcaaatcccagacatctcatctcatcggtatatatttctaaaagatggctttaaaaaaaatcatgatgacattatcacacttaaaaattaatagtaattcctcaatatgccattgaatatggaactcagctttaaaaattctgtttgataatatggcaaaagacaaattgaagcttccagtattaatcagaacttgtggccagggaacagacttggagagaattataatgttatgtactaaggtaaaaaatgcatatatgtattatatttatacctccaaagattatgttcaatatataatatattattataaattatataatatataaaatataatatattatattatattttatattggtatatataattatatataacttaattataattatattggtatatataattatatatataacttaaatataattatatatcgttatatataattatatataacaattataattatatcagtatatataattatatataacctaattataattatatatcagtatatataattatatataacctaattataattatatatcagtatatataattatatataacctaattataattatatatcggtatatataattatatataacttaattattatatattggtatatataattatatgtaacgtaattattatatattggtatatataattatatataacttaattataattatatattggtatatataattatacataacttaattataattatatatgagcatatagaaattatatatactaatatataattatttatatattatatatattctttatatattattatatattaattatatgtaaacattatttatatatgtaattaaagaatgttatatatatgtaattaaagggcataatctttttttaaagtaatttttttttctttttttttgagatggagtttcactcttgtgcataatctcagctcactgcaaactctgtctcccaggtagcgattctctggcctcagcctcccaagtagctggcactctgcaggcgcatgccaccatgcccagctgatttttgtatttttagtagagatggggtttcaccatgttggccaggctggtctccatctcctgacctcaggtgatccacccgccttggcctcccaaagtgctgacattacagccatgagccaccgtgcccaggcaaggacataatcttttttttttgagatgaagtctctctctgttacccaggctggagtggaatggcgcgatctcacctcactgaaacctccacctcctggattcaagtgattcttctgcctcagccttccaagtagctgggattacaggcgcatgccaccacgcttggctaattttgtatttttagtagagacagggtttcaccatgttggccagactgatctcaaactcctgacctcaagtgatctgcctgccttggcctcccaaagtgctgggattacaggcgtgagccactgcgcccagccagggcataatcttttatactaatagtaggtacatttagggagattctacttgtgatttgccctgcactgtcccaggcactgtaagtgtatgctctcctttaatctgttttataaatgagatctcagtgccaagtacagtggcctaacgtcagaaagcttgtgaccagtgatgggtactgagcttaaggaaaaagtgaatggaaaaatctaagttcaatttaagtcatcaaattaaatataaattaggattaaatggtataaccctgtaacagaaataatttacctgagagggagaactaaagtgcatttcctcaaaaaataatctattttttcatcttgtaatgagtctgcaaccctatgctcaaaagtaaactgaatactattccccatatgtgctgcatgaagttacttcaaagcctttgtaacggctgttccctctgcccaaaatgctcttcattctctctggctcagttcataggtcttcttccagcctgtgagccctaaactacctcttgtgtccccgagccttcagaatttgttgcctgcactgttcatctgtcaatcgcaccctgtcttgtgacatcccctgtattgctgtcttgaactgctatttaaattcctggatgtttgtgttgtttccttaacgctgtggctccttgcccagtgcctgccaaccgtggacgtgatggattcatccatttgtcaagccttcactaagtgcaccaagcctggagctcagggactggtagtcagaattaaccaaggcttggttccggagactttgcatctagtgagagttcaggcactcccgagggtgagcgctagttcccaagtttataaactgactgctgtattgtcatatactcaggttgctttaaaagaagtctttcttcctccaaagatttttcaaaagcaggcataagaaatagctaattgaagaacacttagagagaggttcctgcttatggacattaattgtggcaatttacgctgcctgagttaccatgaaagcatgggaggccccttagcaggaagtaaaactcgagggaggctattaaccatttaacattctctaaacaccagggaatgaagatttcgcttagtgaagagcagagagaggttgctgagctaatgcattggcctggagactttgaaagtttcagccctacccagtaggaaagaagtgtacaacagagtagtatgggcacctggatagcagctggagttctcttgaatgtgtgacaaataaaatgaaattggtatgaggactttggcaaagtcttgccaaggcttttctggaatggcagctcagattagttttggctgtttatgatagtcactgcaactgcctcctattagtgctgacttggctacttcccaagggggaggagtatttgtttttggtggtgggctggggaggtggatgtggaagggcactttattggggtgagagcattgtcctttttgaatagattattaatagagccttggatgatgagagaggcaaggaagaaggcagcagatggagccaaggctgaaggagctgggagcaggagtgatgaactgagagcagctgttgagagacagccagaagcaggggcctcagctctgggccatggggcagagcatgggtttgcaggcaggtggaccagttttgaggagcaatcccccagcatcctgcctccccacccctcgcttgacttggctgcctgtgagaagctagttttgttttgcttaggactgtccggtggtaagctgccacgctttctggagaatctgaacaatatgtcttttttgagaccttctagatcactggtctttgactggggcaggcataagtgggtgcttggcaggataccctggagagctttctccaggctcccatgctcgaaccccaccttggaccaactaattttgggttctcaggaagaagtcctggagcatatacctcagacaggctgttcaggtggttttgtggtacacttctggatagaaccactgctctagctcaggcccccttagaccaggttttggaaaacacatctctagggagtttactacctatccagaagcctgttccatctttggttttgatattgtgccttccataggacatgccaaatctctcagctatgtgggtccttcagctattgaagccagcctccagggttatgctccagcctaaatatccacgatgtttcttgattaatagttattaaaccaacctatgaattagtccaagttgaggatggggtaagagagaggagaacagaaagatgacattaaaaaaaaactcttactgtcaggatagaacaggatgtggcacaataaaagtccttaaaagtatattgatactgtctttttttttctcctgattataaaaacgatacttgttccctatgcaaacagtgaaaacccataaaggaaaattaaacccctagtaatcccacctaccagatatgaccattgttagtatttttgtgggtgtctttctcattaaactcacattactcattaaatttacagctttgtaaacttctttttctctaacaatatcaagatatttttggactttattaatattaactgatgttatcattattatttttttgagacagtgtcttgctctgttgctgcaactgcctcctgttagtgctgacttggccacttcccaagagggaggaacagtaacacacaatcacagttcactgcagctttgacctcccaggctcaagtgatcctcctacctcagcctcctcagtagctggggctacaggctcatgccaccatgccctgctattttaaaaattttttgtagagatggtgtctccctttgttgtccaggctggtctcaaactcctgggctcaagtgatgccttccaaagtgctggattacaggtgtgagccactgcacctggcccatgccatcattattaaaagctgccaactcttagtccctgattattggacattgagcctcaatggtggacattcttcaggaactctgaattcttcttcttcttcttcttctttttttttgagatggagtcttggctctgtcacccaggctgcagtgcagtggtgcgatcttggctcactgcaactccacctcctggtttcaagtgactctcctgcctcagcctcctgagtagctaggattataagcatgcaccaccacgtagggctaatttttgtatttttagtagagacagggtttcaccatgttggccaggctgttctcaaactcctgacctcaagtgatctgcctgcctgtgcctcccaaagtgctggcattacaggcgtgagccaccgtgcccagctgtgaattctttttaaccaagaagattgaatttagcccctcgccatagtctgacatccccatgaggcctgaccctggcccatgcctacctgccctgctggtggccaggtcagattggtctcagcagcttttgtgtcaggttggtttggaccttgatctgtagccatctaagaactgctcagctccttcctggacctgagatagaacttcttgagcttgaggtcccataactgttctcctccactgagcatcaccaatgatgtgggcaaggaggttccctgtggggaccagctcttcagatctacctagcaccagaacggttaaaactcatgaagtaccgctgagcttctgtgtttggtagaggcagtgctgaacttgtcctgtgaccttgggaaagggaccaactctgagtctccatttttccctctgtaaaatggagataatagctcctctctatcctgcctcacagagtcagaaggatcaaacgagatgatgtgggtaaaaagctttgtaaaccacagtgcatcaggcaaacccatgctatacttgataatggacctcccgatagagcccagaaaaaaaatgctgactcaagtctcacttgttctcccagacagagtggactcattggctgcatgagctttggggtgaagtctctcctgactccagacaaggtgggtcctagggatgcttctgtcaggatcatcccaactgggccggggctggtacaggcagagtttctctgtcagctcttgggcagggcttctctctgtgagatggtgccccactgagacaggtgccctgtggggtggcctgcatagcagcactgtgtttattacctgcctagctgagagtttgggtccccttcttggtttgtcttgccagagagcagtttgttaggcagccccaagtcttcccaggaggctctgagtctggtgtctgctgttgaagacattggcagatcccttggggcccagagcactcctgggcctgccccagaagatgagggccaggtgcacccgtggtccgttccaggggtcctcttcatgtgtctaccaggcctgatatttctgggcctaacaggtgctcaaggatggagtgagcagcaccatcctctgtggagctttccttcaggctggaggaggactctttgggacccaagactcctagctctgggtcactggtcccttatcaatttctacgctgcactggactccccaaactggaaggtggagggtggggagcactccttttgcacatccctggaaatgtcctggtggcttgtggcatggcctgccacgcagatttttgtcctggggtgggtggctgaggaccctttatcctgcatgtgagtcctaaagagcttctctctctctctctcttttttttttcttttgagacggagtctcactctgttgcccaggctggaatgcagtgttgtgatcttggctcgctgcaacctccgcctcccaggttcaagcaattctcctgcctcagcctcctgagtagctgggattataggcatctgccaccacgcctggctaatttttgtatttttagtagagatggggtttcaccatgttggccaggctggtctcaaactcctgacctcaggtgatccacccgtctcggcctcccaaagtgctgggattacaggtgtgagccaccgcgcccggtctagagcttctcttgactgcagccttggcttcattctcctagaaaagatgttccccctggagactgctcaggagccacaggatgccttttggtctctccatccctctttcactccttcacttctgttctgtcaacaaatatggctcctactgtataccaggcatagtgtgaggcacatcaaagagcctgtgcacaacttagtgggggagacaggcaagtagatggttgtcctccagggataagaggctgtgggaatttggcagaggggagagccagatctgccctgagcatcacggaaggcttcctggaggtgcaggcatggcagctcggggccaggaaggctggagagtctgtctctcctgtgggtgggtgtccagtggctacttttggagggggattggtggctgcctgacctgtgcttctgcctcctgtgtctgagcgtgccattccttctctcgtgacaggagatcagtggttggtactacctcctaggggagcacctgggccggaccaagcacttgaaggtggccaggcggcgactgcggccgctgagaggtacctgcacacccccttcagcttcccttcccaggacctgccccctccctcctttcctgcatagcggcatcagtactggtatttggtggcccctgctactgagaatgctatcagcctgctgggtgcagggacttctcaggagcacttgctagagtgcaggctgcaggaagcctcttgcccatgcctccactgtttatctggttggacttttactgtagaggctatggtctgaccccatgtggtttagctccctcccttgtggggtactttatgcttccccagtggccccttcccagctccatgtctcagggatcccccaggctgccttgctcatcttgggatacccacctctacagacagggcgtttaggtcctgccatgatccctaaggctcagaatgtggatttcatgacccttttccatgttctgcctttcccacatgcagccctggctcctgagtccctgtctggattgagcctcaggtgtccccacatcctgaggccaggagtggccctgggcagccccatgggcctgtttcccagtgctgtcctctgggtggtccgaggaggggagacttctctgccaccagaagttttctgattctgctctgtcaccttccagacccgctgctgagaatgccaggaggtggggacactgagaatgggaagaaactaaaggtaggtggggacaagctagggcattgctccaggagctggatctgctccttgacagcccctgggcccgggaaacccctaaaggggcagcatttggtgcttgaaactcagcaagtcatgtactcagaaggaataatttcttgattttcctgaggtgtattacaggaaataaatgctcttctcagggtatccatgatcgtggcaggggtggggaaatggccaggcccccacctctggaaatggaagcatctggatcttactaactttgggcctctagaaaccgagtcctccccttcccacagacttctcggccccctgcttcccctgggactgaggccgaatcaccctcccaggttaggcctgcttgatgtcagggggcagctgcgattctgaacctgagaccaaggtgttctaactctattagggcttcaagtctggaaaggagcctttttcatataaggagttgggagaattctccaaaagtcattccatctctttgcagggcatggcaggggatctacggttttctttaacaagtaagagagggaattacttggccaggtgtggtggcccacgcttgtgatcccagcactttgggaggccgaggtgggcggatcacctgaggtaaggagttcaagaccagcctggccaacacggtgaaaccttgtctctactaaaaatacaaaaaaattaactagacatggtgctgggcgtctgtagtcccagctacttgggaggctgaggcaggagaatcacttgaacccaggcagcggaggttgcagtgagctgagatcatgccactgcactccagcctgggtgacagagcaagactctgtctcaattgaaaaaaaaaaaaaaaaaaaaaaggaccgggcacggtggctgatgcctgtaataccagcactttgaaaggctgaggtgggcagatcacttgaggtcaagagttcgagaccagcctggctaatatggtgaaaccatgtctctactaaaaatacaaaaattagccaggcatggtggtgtgcacctgtagtcccagctacttgggaggctgaggcagaagaatcgcttgaacctgggaggtggaggttgcagtgagcggagattgtaccgctgcattccagcctaggcaagagaacgagattccatctcaaaaaaaaaaaaaaaaaaaaaggagaaacaaactcccagcaattcattagcccctgtataccaggtgctgttacctaatcttcactgcccgctctaaggcagctgttacttccgcatctcacagatgagagggacatacatggttcagagcattaggccctctctgtggccacacagctggcaggtggtgaaggcaggctctgagtgagggctggccaccttttcagtgtgctgtggcacactgcctcctgtgcatggcctagctgggaatataagacattgctgtagttcctaatagtattttacgtattacacaatatcggcgtattacaatctaccaaacattttcacgttcactgactcaagtcattcactcattcatcattcattaaatatttccacctatgtaggctgggccctgtgctgggtgctgggatgcagctctggacctgtctaaggccctgccccatggagcagtctagagctgtgctggccagtgtggtgaccacctgctacctgtggctattgagcacttagtggctagtgtgactggggaactgagtgtcaactttagttttaagtaatttcagtttacctggcacatgtgtctagctgcgactgggttagacagagaaacttgccaggagtaacttgtcaggtttgttttctgtggtttcattagttgaaaagctttcctctggcttctgtggggaactgcaaagacctttcctcctctctttctacttgccaagcacagagaggatggtgatcagggggcctccctcgtgattcatggaaattacatgggcatcaacaccgtaagtttgcttcctccaacatcacaggtttcttggtggcttgtaaagtcctcctgcgtgctggattctgcacacaggccctgagccccttgttctgaggtgcactggattttcctgaacttatgtgctcagagatgtctgtgggactcagcaaagagggtgtgcttctcagaggcttggttggggccgggggagagcccccagaggccatctcttcagctcctgtgctgtgcaggtggggagatggaggcccagaaacctgggtgacctgcccacagtcacacagcaaccaaagctgggttgaaccaaggaaccctctgtcatcaaggacttgagtgtgtggctgggcttccccaggggctctgagatgggcaaaagcagctgggctcaccatgcgctgctctgcaggatgctatcctgggactgccaggcaagaaataggacccaggttctggtcctagccccacactgccctgctgtttgaccataacctctccaggcctcagtttgtttgtcagtaagatgaggacgctgggttgtctgatgacctggaaatcccttccacatttgactttatggtccatgtgtatcaccagatcctgacagcaaaccacttccatggacaaaggacaaataaattgacttttttttttttttttttgagacagactctttctctgtcacccaggctggagtaccgtggcatgatctcagctcactgcaacctctgcctcctgggttcaagtgattctcctgccttagcctcccaagtagctaggactacaggcgcctgccaccacgcccagctaatttttgtattttttaagtagagacaaggttttaccatgttgaccaggctggtcttgaactcctgaccccaagtgatccatctgccttggcctcccaaagtgttgagattataggcatgagccaccacgcctggccgaaactgacttttaagtagtttccaagtggcaggcaggtcttcagactccaaatgttttatgttccctgtcatgagatgggatgtctgtgagtgcaaacccccccaaggtatccttggattctttaggctggggcagtctcctggatttctagcagggtccctgggacttgcagggggaggaggtgttgttatagagcagccacgttttctgcctgggttctcctccagtgaggggtgtttgtgagaacattggaatcacaaagtggcccatggcggagaatgcagccagaacaaaggcgccctctccccgccgggcccggggaatactaactagttgacaggaattttaatataaaactctccctcttccttgtcattctgaggtttcaggaagccttcgggcttatcgtgcagaggcacacagcacagacagggcttggggaggtgagaggtgatttcctgccattcttctgtggggcgggcttcccagggtgctcatgccaggctgacgggtccagtgcgggctcccgctgctgggggagagctgggttttcatggggcggcagccgaggcaggacccgcagccatgaaccgcttcaatgggctctgcaaggtgtgctcggagcgccgctaccgccaggtgggtgcttggcctcttgtggggagcctgtggggtgttcagggataggggtagagggaccatctgagaaggatctcgctcctcacaaggtcttctttgacctttcctgctccctgcaggctcacttggatatggggaggaggatagagacaggagctggacccaaggcccctttagggcccagctctgtatggagtcctaaccactggctgggtggtgtttttggtgagataatccagctagctttctgttctttttatctggggaggggctgtgggtgtgagattgaaaatgccatggttgctgagcagctgggagcagagtttgtatttttgctaacttttcctgcttctgacaggacagcagtgcccattctgccccctgtgcgtgtatgttggcacgtgctcatatgtgagatcgggtgttttcgtgtatatgtacatatgtataactttcctctcccctactgctgatgcctcactatggctcaggattcctttggctttggaatccaactttacagtgagggtttggcctcttagcctccggtcttagaaagggggaagactgggccattatgatcccattagctcccctgagcctcttctagaactgtgatgggccattttttctcataaaataggaatggggttagggatggtgaaggcaagtgatatctaatctggaagggagttctgaaattgtcctgattttaaaaaatcacatagagaagcccctctatttgttttaatgaccagattggactgtgggtcttgactcctctgactggcagtgcttaggtcccagggagatgcccagaggggtccctgcccccccacctgcctgctaggggatccagtgttttctctctagccctcccccgctctcaggttctgcccttcaggccccactctgtgtttcctgccctcatggggctgggaaaagcagcccctgcgacactagcgtctggatggcagagtggtgagacagagagagcactggttgggacatctagtagtccttggtcaccctggggctatgggctagaagactgggcatgctggctgtcagagtggggccaggagcaattgtgggctggacctagggctcagggactcagagttcaagatggtttctgtgttagaaaccagtgcagaattgagagcagcaagctttttgtcaggtctgagctcaaatctagctctgttcctctttagctgtggcttttgagcaagtcactgttcctctctgagcctttatctcctagtcagtaaaataggataatgaaatccagcgatggtgccatgggagtgaataggatgatgtgtgtgaagagcctggctcagtgtctgctgtgcatatttatctaggaggtgtttaatacatggcagaatttggggattacagtctaggcaggacagaggaacagaaactagacaggagagcagaggtaaggggctggcatgggtgagacctgggagcagtggctgttcctgccctggacaggaaagagcgagaaccacccgcaggaaggacaggctctgtcagaagccgccaaggcctcggggcagggctgctcctttcacctccaggtcagagcagggctgagagccggagggtggagggggtggcacttcgagtcttatctccttgtctgtaaaatgggcatactcattcccctaggggctgcagggatggtcaggttctttggacactaccctctcaatgtggtcagtgatcatggtggacagagtgtaattctgcttcctccgagctaggaggtgagcttgcctcccggcaccctctcctcttcccctccttcacactcccatctggcttggactgtggtctgggctggcacttcttaagctggtgcccaggagggtgaggggcccccagcccacagtcctgcttggatgtggggtctgggtgtgggaggaggaggctgttttcttggagcacactcctccccagaccccactctccagttactgccccataactggccatccagagcccagggtgctgggatgggttttctatgcagggggctttggccctggatggggtaggggtggggaagtgctggataggctttgggaccccagcttgtgcttgggttgagggttggcttgtgaggcccctaaaaaatccccgctggttccatggagggggccaggctcctggcgtcttccctggcctcaggcgggcccggcaactagtggctgctcctttcccccagctttccacactcgtacccgcgtttgtttttctttctttctttccatttttttctcttcctgtcttagctgcgtgttttcccagaattcttatgggaacggggtattttcctgcctcctcccccttccccttgtctgtcaggtttcctgttttacaaacttgctttgaatccaggcccggggctggtgggaagcagagcctcagaggtccctgcagcttccaaggcccttggtcactctgagccccctcccactcaccttccttatgcctggccctgggatggtgggtaggtgaatgagtgcaggtgcctagtcttgcagggacaaccctcaaaggaaggagacagaagtctcctgacaaggcttgtgcccttgaccttttccaagcttgctgagctggcctttgtctcaactcacttgggacacccttccctgtgcctcaccagggcccaccccaagtcccagtttctctagggggtctctcgggaccccttgaatcccttttctgatttgtgctgcctttagcagccggaatgggctggcagaccaccctacatcctcctgtgtgtgggacactgccaggctgtcctccctgcattagcctctgctgagttcctaccatgtgccaagcatggcgtccatagtcggagcataaaggactgagaatggcccagtcctcctgcttttctttagtgcccgctgtgccctgcttcactctggagaggtttgtgtaccctcgtgctcctctgggaaccagagaccaaggctgcatgcctctgtatgtccacagagcctggcatgctgtaggagctcaataattgtgtgccagtttgaaaagagcatccagatggcaaggccctctcatggacttctgaaagtaggagttgtggacctgtcaagcacatgggcctcagcaggcacatgagtcagtggctagttcaggttcagccaggaagcctatctgtgaccttacctgggagtcctcatgggatgccttggggccctggccacagattggcccccagaacctcagctctcttcctctgacccttggcctgagatggagtgagtgtgtcccagtgtttcctcccctgtgctctgggagggcagtgaccaggctggccttgactttgggcccttagcacagggcccgccccaggctaacgctctgtgaacctctgtgagaaaggaagaagggagccaggaaaacagtggatcaaaggtgaggctgagtcatgcagtgctggtgggcccttggatcaagggctggggctgctggggctcaggatggcaaagtttgcttttccaagaccttgtccatcccaggccctccccacatcagcctgggtttacttgctgagctttgggccttcctgcttggcccacaacccagtgctcaagttgtctgggctgagatagggacactgaggggctggctagctcctttgtgcctccagttcccttggagaggagggtggctcttggcaggggtgggctgtgggcttcctgaccttggggtagaggcaagagcctccagcttctggcagtgaccgggcagggctgtgtcctagatcaccatcccgaggggaaaggacggctttggcttcaccatctgctgcgactctccagttcgagtccaggccgtggattccggtaagttattgacagggggatgccaaccccacttgcccaccacacatgtgggctttgcaaacatagtctggaactaaaaggggagccccaaactggagcaaagtgtcctggcttttcaaaatgaaaagaataatatttttaagtgaccgtagatgaaactgccatttatgaaaatatgcccactttttttttgttgtttttatcaaaatgaaaataggtttttatattttgtttcccaatcagtttgaacaggaactaaacctatattttcagcaatggctgcaagggaaaatgagagtcatttgtgaactctatttgaagctgttttgtatcctatccagagcctgatcagcacttaaaaagagccatccttccctacttttcacaaatgaagatttctcttaatcacagagtgagcatctcaaagacagaagccagggctcagtggtcagggtgtttccagtgcctacacaagggtgggcatgaggttcgtgcacaatgattggcagagaaggaataaatgtagtgtgggagcctggccccagggaaggttctcaatggggtaggaggccctggggaggggtaagggcccgggtagaagggtggactgcagagaggtaagccagcagtaggggaggtaagccagcagtaggggaggcaagcagggagaagggaaggcaaagggatgccttctttcaaggctcttgagaggcaccaagttcagtccctcatttcacggatgaagaaacttagagaaaaagggaggtccttgtctgaggtcaccatggcagcaaaggactccagatcctttgaaggggtcttaggcttcaggggcccctgaatggcttttctttgtccctgcagggggtccggcggaacgggcagggctgcagcagctggacacggtgctgcagctgaatgagaggcctgtggagcactggaaatgtgtggagctggcccacgagatccggtgacaggggacagcgggtggcctggggcctcaggctgatggcacaccctccccacccctgggcacactgccttgcctggcccagctcttgctgctccctcttttgcctagctgtgagcaggcaattccttttgctcttcaaggaatctgtttcttggcctgagaatggaaggttcaggctcagagcacttttggattccagagcaaacagcagggaagatgctctcagactctgtggttcaggacggggcaccaggaggttgctttctgctttagctaatttttgttacctaagagctaagcccatttgttatttaagggcatgaagatgttgcaaatgtttcaattgcacaattaaaaaaatattcttgaaaacattggagtctcccaaattttgatcctctagggtaaaaccccgatggccccattttaggtctgcttctggaataaccagatgagggcttgcacttaggtgacctgctagctttacttgcttatatcttgcttttgataagcatcatggattgagtatggaactctttcctgttgaaactggcctggcctcagggtccttctcaaccactgcccgtcaataggaattgacctaggtgacccatttgctgtctcttctttaaatggcttcttgcatcccttcctgccctgacactgggggcttcccctctggtgtctgcctcctcttcccccattatcctctctgccctgtgggccctcactctggctgatactggctttccccaggctcaacctgtctgtgtgatcccccaccttccaggagctgccccagtgagatcatcctactcgtgtggcgcatggtcccccaggtcaagccaggaccagatggcggggtcctgcggcgggcctcctgcaagtcgacacatgacctccagtcaccccccaacaaacgggagaagaactgcacccatggggtccaggcacggcctgagcagcgccacagctgccacctggtatgtgacagctctgatgggctgctgctcggcggctgggagcgctacaccgaggtggccaagcgcgggggccagcacaccctgcctgcactgtcccgtgccactgcccccaccgaccccaactacatcatcctggccccgctgaatcctgggagccaggtacggacagctggtgtggggaaggtgaagggtactgggtccctgtgggaggccaggaagacttgaagacccaaagttgtgtgatgagcagcctgtgaggggctgcgatgttgggcaaggagatggggtatgtgctagctctgccttctgcaaggctgttcttggtagggaggacagatgggtctatgtggcctcagggcacagattcaagaccagggcatgcacaggctggaagatttcaactcacagaaggaagagctttctactagcctgtgcttttccccagtggaatgggctgccttggtaggtggtgagcccccatcataggaggtatgaaagcagacactgcatgattgcatggtgggatgatggagtgcgctccccaaaacattagtcccatgagatgctctgggaaaaaggtgttctgaggtcaaataagcttgcgacatatcccataccctcttcctcatctaggagattctcaatgcaaaggagcctagtagaggctctgctggcatcctgtactacagcaggtgtcaaccaaataacaccgcatttcccaaacttgcctaatgggggcacactttagggcgtggttggtaccgtcttaccattccagtgttccctagaatgcactttggaaccagctgctgtaaaggaagttggggacttgccaaggggttaggcttcatgacccataaagcctctttcaacttgaatattctgggattttgtgttctctcccagcctcctccctcagctggttaccagaactgctgtttttctcttgtgccctgaggtgctccacttcctctcccctggggcccccgtgtccagcagcctcctgggctgtcctgccctgttcctggggctgaggtggttttcctgtctttcccttgcagctgctccggcctgtgtaccaggaggataccatccccgaaggtgagtctcctgctgctgctgtgccctcctagctcagagaggcagcaggggtcagctgaggcctggcccagcctccgcccctgagttctgaggcctttccaatggagtcaggtcacttagcctatcgacacagactctctttccacgtggtaccttttctccctcacggaaccaatgtctttcttccttgaagccagaactgagaaggaggagaggggatcttaccagggcattttgagagaccgtgtgtccaggcctcaggcattcaattgagattcatccaattttacagagcaaccgatatatattaggtgccagaggcaatgtggttgggcttgcatggaagggagtcagggagcgtggaggtgggaggtcttgagttggagttctagctatatgactttgagcaaatcatgtctccttggtcgggcgtggtggctcattcctgtaatcccagcactttggcaggctgaggtgggtggatcacgaggtcaggagattgagaccatcctggctaacacagtgaaaccccgtctctactaaaaatacaaaatcactactgggcgtggtggtgtgcgccaatagtcccagctactcaggaggctgaggcaggagaatcacttgaacctgggaggcagaggttgcaatgagccgagatcatgccactgcactctagcctgggtgacagagcgagactctgtctaaaaaaaaaaaaaaatcctgtcccctcgctgagcctcagtttcttcatttataaaatggggtcaataattcctacctcagagggttgttggggggatcccatgagagaatggttatgagtagttgcctgtatactgagagaggctatacagagggtagctgtctttgaagtgcacagatgtctctgctgctggatggattcttcttctttggcttttaaaatcctgatcaggggtggaagctgagctcaaaaccactttcttctcccaggaaggctgagatattggtcttgaggctgaagctggctgggcattccttgagatccttcgcgtgcctgccagaaagctttgactcagaagtccatctggtgtctggaccgccttccttgacagtggcttttgcttagccactcacagacttgcttccttgctgttcccctctcagtggtgtgaaggcgatgcttctagggggtagttggaaaagtgcttgtgccttttgcgggtgtgaagcgctcccatcaggctcagggatgctgatggaagacatcttctttctctccggtctggggcatttgggcagttgagcctggtcagttggaaataaatctgtgttccttctggggagaagtccgacagcaattcaatgatgagttttatttttattttttatttttccatagattattggggtacaagtggtatttggttacgtaagatttttagtggtgatttgtgagattttggtgcacccataacccgagcagaatatactgcaccccattcgtagtcttttatctctcacccccctcccatccttcccccgaagtctgcaaagtccatggtatcattcttatgcctttgcgtcctcatagcttagctcccatgtatcgttgagaacatacaatgtttggttttccattcctgagttacttcacttagaaaaatagtctccaatctcatccaggtcgctgcaaatgccgttaattcattcccttttatggctgagtagtattccatcaatgatgagtttttaaaaagcttttggttggcacattaggttagagtggagatgctgcagctaagtagggacttcattagggtcaaggcctgggcctggcttatttctgtaggtccagtgcaggacccagggcctggcggatggcagatactcagtagaattttggttgtgtgactgactgaaggagaacgacttgggttgcctctgaggctttggagtctggtcgtggaggaggggggctggagaagtgtgctgcctggagtgggcccatgcacacaggctggtgtctggggttgattccttctcagttgagaggtacttctgtgtctcccttctgtgctcccagcctgtatccatgtttcattcccctctgagagtataatacatagtaagtcagcaagagcacagttatctaagccatggggaaagggacaagtgaggaaatgatgatgatattaataaccatgctagctctttgaatgcattgtattaagatcctgaccttactttatgtattcttcataataataaatcttcactctttaccagggatcaagtctttgtagctcacaattttaggattcagaggaaagggtgaaattcagggcacacaatttcccttaaacacacttgggattgtccagaggttaaggctgtcaccagggtgctggcttcttagtccccctcctctggctgggctgccaagagatagcccttcaggagtgttgggtcatcctgagttgaataggagggagagttaagccatcctgagttgaatagggtctggtgcccttccggagcccagagtgcctgcccggctgtggttggcatgtttcccagggctgctggtgcccttggcattgtccctgccctgtaaaggtgacctggcctcagattcgccactgccagggcagggtggctgccagggctcgcctcagaatctgggagcaaagccctgtaattactgtatttggtcggtgaagcaggtgttggaggagaaaagggtgatatgggggtttggaccagacatcggtagcaggtgggaagtaaatgagtttgccttcacagagctcagtaactgggttgcaagctgtactgttctaaaaaaaaaaaaaaatcagttttacagagccactcccactagccacatattatccaggggtgggtggagattgggcacaagggcatgactgctgcataggttgggttaatcctgccttgtataatttactagccaaatgaccagtcaccctaccattccagacctcagtttccttgtctacaaaatggggctgagccgacttttcctctctgaaggcagaattatgtgttgggtacttcaggtgaggcccttggtgaggattctgtgacagccctgggcccctgggctagagaagggaagaaatcaattttttaagaagtccgagactgggggcccaggacccagattttggcatttacagttggtacccatctttacttttggtctattttgttccagtcatctgcttgtcagtcctgcatggttttgccttctctgctgtaggcttaaccatgttaaattagactgtctagatccaggctggccatggggtttcattcacagcatggtttgagaccgagcagccctgcctatccttctactaaccctggtaggtggattacttggaggcttaggatttgtgataatcccctgactactcacactgtggtacaatccaccaagctcttttccatcaggtctcttgtgtgaacctcccactggccctggggcaagcgaggcagcaatcagtattatctccacttcaaagtggagaaaactttgattcagagaaggaaggaagctgttcagggttacacagactgtctctgacttgggaagtcagtgatcaagctcgggtgtcttatccaactcaaattcagtgatgatcttgagactgaggatggtgctttaaacaaagggtccagggcctggcagcacacatccctctgggactgatatgtagggccagatcagacaaggagctatgtgacatcttccttgtatctgttcctcctgtgcccatccagggctcatgctcattctactcctctctccgtgactcacagaagaggcaggaagtggtttgagttatcatggtttgagcgctgcccccagatttgtctatgatcagtggtcacttgtcaggggcacggggggagtcaacttgtttttcttaccttgcttggtgagaaggggctgggggtgggaggaggaagcaagtgtgaaaccttctgaggtgagttttatctccgaggctgtgggtgcgcgttggtggggagcttccctgaggtatagctggggtcaggccacctgttcccccctcgctgccagggctgctggcagcagaagacagcctgcacccaggacccaggctgggcacccaggtcagtgaggacctggtagttgcccatacagtagcaggaatgccttagaaggggcccaggagtgtgtggagcctgactgctttggagtttccctcccacctgcttggtccaggaacccctgactttttagcgactttgtgttttgtccctctgcctactagacggaatgtaacaaaaacctgtgcacaggctgggcatggtggctcatgcctgtaatcccagcactttgggaggctgaggcgggcggatcacctgaggttgggagttcgagaccagcctgaccaacatggagaaactgtgtctctactaaaaatacaaaattagccgggcgtggtggtgcatgcctgtaatcccagctacttgggggactgaggcaggagaatcacttgaacctgggaggtgggggttgtggtgagccgagatcggccactgcactccagcctgagcaataagagggaaactccgtctcaaacaaacaaacaaaaaaacaacaacaaaaacgtgtgcaccaccccttgttcagggtgaggggtgtgtgtccatcagtgtccccttaaagagggacccctccccccacaccgccgttgcagcctctgctgtccttcctgggggtggtcttgtttctctgtttctctctctctctccttatgattagaatgatttgtgagttggtggccaagccggagtacctcctgggtacagtgaagcctgggattcccagagtcctatggggcacctgactcccaaacttgcttttccaagtggagaaatcacaacaacgaaacaacactgagtttgcagctaacttttatcacacacttactaggtcccaggcactgttctaaagactctaagtgaacttagagtatttcatttaatcttcactgtaacccagtgagcttggcactattgttacagttgaggaaatcaagactctgagggtgaaataagttgcccaagctcactgagctggtaagcaggggagcaggatttgagcacagccacctggctttgaagcttgtgcgctttcctgtgacctggggcagcaagtgccactccttattctagactgactggagtgggccaggctgctctagctcccttggctacagagggaggactccagtacatcctgggaaagcctttggtctccgctgccactgctgcagagagtggatttttgtctgtggggcagggagggaggaaacagattgggctgggctgagcttgtgcagggagtagtgggaatggtgtgggggtctgttaaggagagcgcgtaccctgccacacaggctggtcaccactctgctccaactgattgttccacgtgggactgtgggctcagtgaggacagatcttctgatttttcaaatatgagcgatttcttgatttttaaaagactgaggccaaaatggaaattctgatccggggcctgggtcagcaggtggagtgtgctgcctccatcatagctggtggtgcccagcgctgtgctagccctggacttgcttgctcacgtgtcaacgtctctcactagagtgcgagggaattccttgaagcccgagcccatgtgaagcctccctgtgtttcagcatcgtgcgcagggcctggcacaaagtagctgctcagaaagtggttgttgacggaatgagtccgtgtcccctgtttctacagaggggacacctttgcaggagtgacggaaatgtctcatagtcccccatctctgtttcacagaatcagggagtcccagtaaagggaagtcctacacaggcctggggaagaagtcccggctgatgaagacagtgcagaccatgaagggccacgggaactaccaaaactgcccggttgtgaggccgcatgccacgcactcaagctatggcacctacgtcaccctggcccccaaagtcctggtgttccctgtctttgttcaggtgagcccgtggctggtcttaaaggttccctcaggaggaacggagaaagaggagggcccttgccccaggactcagggatgatgacttatcccaggactgagggccctgttttgggaaagataagtagctttagatgcataggattctaggggcttatactgagggagcagagatttccagggagatacacaggaaaaagtgaggccgggatagcccagtaaggaaagggtcctctccttcccccacctcgcctcccctttctctggggaaagggcaggtgcaccccagctgcttgttgccatgtcacagggactgtttgccaaagctcccgctccctggctcacccagtggttttttatttgaaaataactgagggagacccttggggtctgtgccttatctgctctccctggtctctgcaaacaagtttggcctgtattcactggtggcctgcgattcactagatcgctcttattctccaacgtcaaacaaagtgcttgaagaaagataatgaaacaaacagcaagctgggcctgaaatcccagctacttgggaggctgagatggaaggatcgtttgaggccaggagttcgaggttacaatgagctgtgatcataaccctgcactccagcctcttcttcttcccccttttcctccccatttatctctccttctctttaaaaataacctttattgggccaggtgtggtggctcacgcctgtaatcccagcactttgggaggcctaggtggtggatcacttgaggtcaggagttcaagaccagcctggtcaagataaaaaccccatctctactaaaaatacaaaaaaattagctgggtgcggtggcaggcgcctgtaatcccagctattcgggaggctgaggcaggagaatcgcttgaacctggggggtggaggttgcagtgagccgagatcacaccactgcactccagcctgggagacagagtgagactctgtctcaaaaaaaaaagaaacaaaacaaaaacctaaaaatctttatttattccatcacccagatatgatagtgtgaacatttcagcatcttttctgtgtgcatatgcacattaaaaaacagaccttattctatattttatatcatgttgcctttttaaaaggaaaattgtagcatgaacctttcccacaccactaaatgctctgtgttttacggtggttgcccactcttcttttatatgggtatactgtatttatttaaccagttctgtattcagatacttctgtctactcttttgctattgtaaataaccctgtgatgaaaatccttgcgcatggattgcctctctgattattttccttgggagagattgctgaaagggaaatgactgggtcatgggtcataaacattttaaaggctctttacacatattgacaaattgctttgcaggaagattctaatggtttatcgtcttatcagcagcatagacatgacttggccccacgggcttcatttctgcctgtgcctctctggtctccctggcatcccagtctgagcctgtcactgtccagtaggcacactttgttaggatgcaacacatctctgggagctcacacgcctccccttagacagctctgtcagcagggcctggccttagcctttctgtgggtctcttctctttcttagcatgtgacacaaagttcttggcatctacaatgtctaattttctttctttttctttttttttttttgagatggagtttcactctttttgcccaggccggagtgcaagggtgcgatctcggctcactgcaacctccacctcccaggttcaagcaattctcctgccttagcctcccaagtagctgggattacaggtgcccacgaccatgcctggctagttttttgtatttttagtagagacggggttttaccatgttggccaggctggtctcgaactcctgacctcaggtgatccacccgcctcggccttccaaagtgctgggattacaggcatgagccaccacatgcggcctgtgtctaattttcatgttcattttaatatttgtataagaaactacttctatttaagagacagtctctcgctgtgtcccccaggctggagtgcagtggtatgatcacagctcactgtaacctcaagctcctggcctcaaatgatccttccacctcagcctcccaagtagctgggatttcaggtccagcttgctatttgtttcatgatctttctttaagcaccttgcttgatgtcatgtacttagaagccatattagaaatatacagtcataaggacaagtcctgctgggtaatccagagcttagggagcttcctctgggctgggctgggcaaggtgagggagtagggtgagaggtttgggtgataattgacccttgggggattgcctgagaaggagacagttcaagtgtgctatgagtgcagagcagggactggcctggctttgaagggactcaagtgaccaaatctcttggcatgtggctctcaggatgcctcttggtcctgtgaggcatgaacaggatagatgggggatggcgggggctgggagggcccaggagcccagtgcagtggggggtgagagctggggctgaggactgcagagggcctaagcctgtggttagacttcctgtcaatgagtgtagctctcacggtgagggttgatggggaaggtggcagcaacagttccacaggacagcagcgtctctctttctgtttccatcttatgtatgagggggtgtgtgggttctcgggtcggtggcgggctgacagtcttctctgggtcagagggttctctgtggctggctttgacaagctgctgcttcctccccccgggtcctcacccagcctctttttgaactgcccactcagcctgctttatttccagcctctagatctctgtaatcctgcccggaccctcctgctgtcagaggagctgctgctgtatgaagggaggaacaaggctgccgaggtaagactttcacctgcattttttagggggctttctgggtgggcttcattggcattctccaggcccctcactttggtctcttcctgagtatcttagaattgtacattctcagggtaggggagacctgagaaggaccccgccactctccctagcaaaggctacccagctttttcttgtacatctcctttcaaaagctgtcgaatccttctttgatggttagaaagtttccccagcccctaaagacaccccattgtttatcccaccttcctctcaggagcagaagagatggcaatttaccctggctgtggggagtgactttggtggcaggaagagtaaagctattagccaaagtgaatttttagaccagcatcagtttacctgagttttctgggcctgttttaacccaaatcccatgtcctcttctgagagacgagtctatgatttcgcctgggttgtagctctgcctgtggggtgctgacatgggacctgtgtcacccttcctgggagctggcctgggatgcttttctctaattgggagaacttcattcatctacacaaccccagagctggtcagttcagtctctgagcttaaactacttgggtacagaagttggagccctgggctctgccctggctacctggggccatggggtgagggtagcaggctctttgcagatcaggccccaatgtagagctgccttggctgagtcgagtggcagcttggggtagtggaaagatcaggaaacttggagacaggaagtttgtatcgagacccaggtctgctgctggctcacatgtgatttcttccttcttcctcagtctttccatctgagcagtaggtatgtgtgtatttgaggcagtaagggcagggtcagaggttggtctgtaaggacgctttaaacctcagccttctgggacactatgtgtgactgtggctgaagcaggaggttggtttgttttttaagtaagcagactggactggaactcatctattccaaatgtacattatctttttcaagggagtgccctgggggactgcatgctcccttccaccgctcgctgttgcctactgtatttctggacctcctcttttccgaacctcctcttgggaactttgcaaactttgggaacttaacaatctttgcatatcttctgaattgtctcagtgggagtaaaacttcatctgttgggagggatttaagttttagggatgagaagtcacttagagctatgtttggtgaatgagagtgtggtggacctaagtctggcatccaagggtcagaaattgaggtgtggccataaattcacagactcataagaagccagttagagatggcagccaccctgaaacatatacataagtctaaattcactcttctgtttgtccacttacccttgaatctgcaaacattgagcacttattgtgtatcctcattgtgtatgcattttacatacttgaccccaattagctcttgcagcacccccatgaaaggcacgattgtccccactctgtagttaaggcaactgaggctccagtgagattcactgggacccaagagtctccaggctggtaaggaatggagccgggtcatttctggctcagtgatgctttccatgaccccacactgcttctggcatgtctgcataaagacaaactaaggaacacaagctgaagccagagccttgtgacagttgcaattcgtccagaaaaccctgccttatagatctctggagacttagaaccaagagacccctctcccttagccttgaagattgaaggaaacaatttgaagacaagtaaaataaatattaatgtattcctttttgttgaagtatgatggcaaccaaacatgtagatctgggcatcctgtcatattactcacaccaaaaaaaaaaaaaaaaaaaaattcaaagggatttggataaattcatgaaatctcagcattggttaggctttcaggagtcatccatgctaattgcttccttgtaactttccagttaaatggttttctgattggtgcttgaatcttctagggcagcccattagagcagtggtttttttttttactgggaagggctaaattgtagagcattctcccttacactcaacagaaatctttatttgtggaatgttcctccttggttctttgtcccatcacttctctgggcatgctcaagtttgctaacatctgtgagctgatccagtcccgcaccgtgaactaccctcatcacagccccttccagaagtaatagacttgattaatgtgccctgaggtctatggccctgtgcgaggttctgggaataccatgaagcacaagacagacacaccctccctttacacactgactcatggagtttaccattaactaaggcaccaaagtctttttggtaaactctgctcttaggtcagattcccaagaagaagcttagttagggccacttgggagaagccaccctccaagtggtaaggacccccttaccaagtgatccctcaactctgaccctttggaaaatcagatgtgtccttggagcaagtgtggggaagacactgggtgacccccgtggcctgtggaaggcgacaggtgattgggccatggagatgggcatcactctcccatgggctgccgtggcccctgctggtgctggtgagatgggggagtccacatgccctccccggcacgcttgcccctctgctctgcctccagctgtgtgccagctctggcctttccctgacccaacctttgggaaatttttcatttatgccttaatcacttcctgtctagaccatattctcagccctgggaatctgagccagagtggtggcctgggccttttctcaccttgctcatggttcttccccagttgctggtggctcctcctacttgccctacttccacccctctctgggcctgggctgttttttttttttttttttttttaaactttctaggctcctgacagattgtcggctccagcccttcccctgccagcctccctctgggtctggaggtgactaccagatttcccttgagtcagcgacacgttttgtgggaccctgagggtttgctttgtgtttctggctagtttagagccttctttccattgctcggactttgaagtcttctcagacaaccaattccttgactccttctgagctcttgagtcattttcttcacctcatctcttaacattattattatcattattattattaattattatttttgcctcatttgctccacctctttggtctctggattctttcacattcaggaactgcacagctgtaagcacattggtatctctctgtatagtgatagctttaggtcagctatacctgggtaatggtccctggctgtgtggccatggacaggtcacttaacctgtctgagctctagggtcctcatctgtaaatgagggcagtggtgttatttataagtgaggatccactgagcagaaaggaagcgttcaacacttgaagacttctcttgggctgcactgagacagggctgtggtgggaagggttagggtcactaccaagatgccttatagcccagggttctggagtcctcatgtttgggccccattggagaagccaaagcccctgagagctccttcaaggacgtctccctgttgtctctgcagcccagatttcctcaagcctctgtatttgtgctacactcaagaagccaagccatattttgatatatattctatatttttaaattacaaaagtaacagtgattgcaaatataatacacattaaatcaaaatgtatcaattaaaatcccactccctggagtgaggagtgtggcatcttaactattttaaaaatgtataactatagagaaatgtgttgttttgttttacaaaattggattctatgctagatatttttgcacattgtactattttgatttacgatagacagatttctatttctgcccacatagctctactttattttttaatagttgcataaaattctgccgtatgaagttagcacaattcattttattcatcttctcttgatgaatgtttgttattttcttaaattacaaaaatgctgctgagaacatcctcatatgttcatatttatacctccttgtaagtatttctgtaggatagagtctcagaagtgaggctgtggggtcatctttaacaggttgatagctgaatgtcaacctgttggctttttaaatgtcaccaacagtccaacacacactcacggtacccttcagtgcatgccaagcccttctggctggttcttcttcagaagagacaaggtgtcaggtgtttgatatctcaaagggaagttcacatacttaataacactttgttttctttggagaatctaaaattggattttattgcttttgactaaaggccactgcaggatttgcaaaacaaagaacagtgtaatctttagtggcattaaaggatcaagtggattttcttagcataaaaatatgctgagcgtgcctgttggtttacctataatgtctaagaatagcctctgcctttatttttggagcagctaatgcatgaaaaagataaaagtgatgtccatgtctgtactagagtgtgagtaactggctgtttcttaaactgatttctcattaatgcaattaaacttatccacaaggaatttgataatattagctcacattgtgtggcgctttactaggtctgcaaaaagctcttggaaggatcctgtaagaatgccaagcagggactcttctccctgtttgggctgttgagaaaactgaaggggttaaggggtttaagccaatatttttgtggctagttggtggcagagctgggataggagcctcctgacttctgactttcaagtccagtgctctttcagccagacacttagagcagaataaaagcaaatatggaaaatcttacagcttaaggattgctccaagccccaggtgctgggctggaggctccaggagcatttggtcagagatgtaggcttcggggatcaggctgtggagaggcttgcagagaccagctgccatggagggtgagggccacttttccccttctgtttgcttttttcctactttgaggagtggaagtataggaagctggagggtgatggggccatcttgactgcaggtcaggactgcccttggctgaggctgtactgagcactgctcctggttttgtgtgagatgatgaggatgcattatctggggaggctgtggctccccaccttctcggggaggttgtggctctcagcctccagaggacagcaaagtagccagttctgtttgctctctgtcaacccaggtgacactgtttgcctattcggacctgctgctcttcaccaaggaggacgagcctggccgctgcgacgtcctgaggaaccccctctacctccagagtgtgaagctgcaggaaggtaagcagatgccgtaggtgcccagagcccctctcaacttgccccagtcccactgctctgggcagccctctgggatctggctgccagtcatccgtagggcactggagtgtgtgctgctgggctctgtccatgggctagtaggtctcagacactggcattctttctaggctggtaagccttctgatatacctgaggttttcagggaagtttctattctagagactttccagagaggctgtggagtcgggtaggaagagctttggattcagacagacctgtgctcaaatcttggccctgtccctccatactgggatgactgtgggcactgtactcagcctctctgagactgtttcctcccgtgtaaatagggataaaaatagtaaccgagaaggttgctgtgaagattaagctaggtcataaatgcaaagtgcctggcccataacaggtgcccaataaatacttgttgccacccactcaccccacagatctgtggacagagaccgcaactcggctctactcagctgcatggccctgcggagcccaagccgctggggctcaggcacatgtgggagcgtggagggaatttctaacccaaactttccaccacgccctccactcgtgggaggggaagccagctgggagtatctgtcagtggtttggtttggcgcctgaggtctctgctgagaggggctcggtttcctctcccagatcatgaaaacaacagacccgtttgaggatgggtgacaggggcagagaggaaaatattacccagtgaaagaattctgttttggtggggtttgctcgggaaagcttcctggctgtttgcaaactgtcctgcctgcttagtgcctgagtgttcctcctcctcggaaacccattcagtatgagaaccgccactctcacttccccacaggaagccactgacaacttctccatctcgggctctggcctttcccctgtccatggaagggaaaagcaagtcacctcactgggtcagctcctccctccaggcgggctcagcctgaccacagggcggtgggaagaagccgcctgagcaactccagttccggcactggcattcccagagttccccatgcctgctggagggcattaggttggagttccagtggcctctgttcctgggctttcctgccatcctctccatacccccagcccctccctggctccctcacacccagcttcccatatgcccattctccagcctgcagtgtgcatattcacacatgcactcacaccgagtcccttcttctctgcttccccctccctgcccccagcccagacagtctaggaccccatcacatttgagggaggagcactggatgggccagggctcagtaatatgccctggttggtacatgaatggaaccctctctctgttgtgcacattacaaggctgaagctataacccaggaccctggtttgctcagcttcctgcgagaaggagggagggaagagaagcaaggctcacactggctacaatttgggtggaggtggaggttgcggggagaaggtagtagaggagctgagggcagtggctgggagtctgggatctgggcgtggtactgctgtgctgtgctgtgtggcttcagctggccctttccctttgccttcagtttctctgactgggaactaagggtggggccagcgctttgtgtccctcccagctctgatgccctcacacagaaccccagagcttgctgtgagcagctgctggaccatgcctatattatcctgcctctacccctctgggggcctggttggggaattggttgggatctccccttctggaggccccaggccccagacttgaagctaggggtggggtgtgctccatcctccactgggttgtgatggtcaaggtgggtggtgtggggccttggggtgtcacagagactctccaggtgctgagctgcttttgagctgcagccttgtgtaagcttggcactgtggcttcctctccctgcagatggagggcgagctgcacaagggctgaggatggccaaggcagtacttctcaggagagaccaccatggacggaagagccccttgggttggtgtgggagaggggcctgtgtgtgtgtgtgtgcatgtgtctgcctgccctggatttttttggatagatggtttggggccaaactccagggagcctgagagctgctgagagggatggaaatggctccatttctaggtgcacaatccaacgcttagatttctttccaggcaccgatagagcccttgccttcccccagctgcccccactcccctgagacaggcttgtgggcccagaggctcatggaagtttagtgaccccttctcctgcagtctaaattggagccgcaggacccagtgttctgagtcctggcgtccaatttcctgcctgcttcccctgtgccccaagagacctgctgcagcagcaagggcctgaggcttttaagggatgcatttgggacctcagctggagcctctgttggcagaatggtctctgattaatattgctcatgactcctaggtttcttatttgtctctttcaaaccaccatgtatgcagaattcaatttggggcaaagaagatggcaaacaaggaatgcacccaacctttctggctggttggggctggcaggggctgctccctggcaggggagaatcagccccatgctagggaccaaggtatccctgtgtaacttgtctgaagagtccttagctccattggccaagcatactcccagggcctagcctggggcatggaacactgtgggtgcctaatcaatgtttgttgtgtgaatgaatgactaaaaggagagcagaagtgttgcctcagttcgggagctgggggtgcacctctcccccagggctcctgggtggtagtcacttaaatcttgtctggccccgtcctgcccagcctcccctaggcttcagcagggctgaatggcagtgtaatgggaacaggcggagagctggcgctaacaattggaacatctccggtcagccggggcccattgtggtctcttcctgcctctgctgcccgctagctttgctactctttgtgttgctgcctcccaggtggccagcgtcatgcccatagtgtgtctttctggcctgctctggtgtctcagaagtggcctggaaatgttttgctgattattaggctctccagtcaccttagagccaggtaggcagttgcagaaagtcagttgctttggtctcagctgctggaatgtttggagttaactcttggttagtcctcattttctgagcatgtcctcagaacccacatcagtgatagcagtgctggggtggtagcagtggaagggacacgttgccacctctggggctcatagcctggtggaatgcagacgagtaaccgtggaggggtagaagtgtgacatggtggtcaggacgtaggctctggaggcaggcagtcctcacttcaaagctcggctttgccacttactcaatgtatgccctattcatgttgttctccctccctgggcctcagtctctatatctggagaatggggacaataccccttctgcttgcctcagacagcgaagggggtttgcttaatggttgagttttggatctcagatcaggtgagagagggctctgggaaagtgacggaggggtcagacctgggccaggaagctatctctggggcccacccagcccgtgattggggatccctcctgcatggtccatgtattccttgcgggaagcgaggtccactctggaacccaatggctccttgttgcatttcaaaatgccaaggcagttggaatgtttaaaggaaaacccagatgcgtgctgcccttctcctccctcctagcccccagttctaatgttctagaaggggcagaatttctctcctgggtcagccccttgcagcctgttttctacagctgcagctcctctccggcacccttggcttcctcagtttgttgttcttttatgaggctctgaaccatgctgagtgctgcccccattccgtcctcctctcaaagtactgccagcacaaggctgtgacgtggaacagatttcagagaaagtttgcagtaatgcagggaggttggggaaggaggcaagggtgtcacagcacagaaaagttgtcaaggcaatccatccaccattccctgccataggaaatatgtctcagggagtgttcccccaacctcagcctcctatttccctgcagctctcatctcctggactttcctctcccttctagaaccttctcttttcttgccgccagcttctaacccccaagtttctgttattttcttacatagatccttttgactcttacttggcactaggatctgcttctggaaggccaaagaaatgtcccagtgtgttctcttaaacaaaagaaaccacctcctcttgtctccaccctcagcaacacaaggaaccagcagaagctttgaaattacagttttcttaaacatgatggacttcttaggcaggactccctccctccccagtccatcgctaggtgggaagaagtagaaagatttattctccctaagtccgaagtgaaccctcatttacataagggagattttttaatctggctgtgcctggcagcccttggccctagggatagctttgtctcagaactgcccatataccttgcttcgagggggcctggccttcacccacaccagggccctcattcactgcttttcttaggaattgacttgacccacagtctctatttttatcttgctgtcttctctttgcaactaattttgctgtctttgacaatttctttacttcaagtatgtgttaagggttctaccttgagcccagcactggcctggtgctttgagaggacagaggagctggatagggcatatgtggtgggcatttgagaggtgggctgtgtagtggtaggagtgtgggctctggatccaggctacctgggtctaaatcttgattctcttccttactcctgggcaagttactcaattcatctgtgcctcagttttctcaagagtcttgggtgaaaagagccctgtcttccaggggttgttgtgagggtcaagcatatccatgggaagcataaggaacagtggttggcatggagcactgtggtgcgctaaggtcctgtggccctttaagcatttactgttttacgtgctgcgtggttgcttccctcaacaatgacagtttgcctagtgagacccattgcacggtcacagggagtaaccatcccaggaccgtgcccagacaagtgacctaagcgggagtgctgccaggccctgaggagtggctgcagtgggcagggcaggtgtcctggagggagggaccaggctgcttctctgcacttgctcttccttgaacacaatttgtgcttctcttggaatgtcctttcttcccaccttgagtccaaactcaacagggccctccttcaggaagcttttcccagaagctgggtgtcatctcctggtcctcctgcttctgaagcgctctgagcaatcaccttccctcggcgttgacattggaccttagctcctctgctgaaggaggcagttgctgacagccctcccagatgcctcccaggtggaggggagttagtgaatggttgcaactgggatcctggactaggggttaggaggctataggaaaacatacagagaggtgaagcctgggcctggaagctgtctctgggctccacccagtctatgacagggtatccacctgcacagcccaccattccttggcggaaaacaagcctccctattgaatttcaaaatggcaaaggcagttggagcatttaaaggaaaatccagatgtgtgctgcctccaggtctctcactgcagaaatcatggaagggaggaggcctcctgggatggatgagggctccccccagtacctgatgcccagagggtgctgctggctacctctcctggggatgaggtttcagcattccttgggccaggctgacccgcaggcaaatgccttagagctgtacattaccctggttagttacgtagccaattttcctccagagacttccctgcctcccatgcctgcctctctcttttcccaggaggtgccacacacagccttctgggcaagacagctgactgtgctggagcaaactgctgaggctctttatccagttctaatgcaaatcttactttttgttccctcaaaggttcttcagaagacctgaaattctgcgtgctctatctagcagaggtgagtcctttcctctggatttgaggagagagatcttcgacctggtgcttgaggggagacactgggctgggatctagaccagtgttctgatgccagcctccatacccactcatgccgaagtcctgggcaaggccagagtagcggttttttgctaggtagaatgggactagccattcctgcccctgcctctctcacctctgtgttaaagagcagtggacaggaaagtgcttagaacagacccttgagattttctgtgcaggacctcctgaactgcaggaatctcagtgggggtgtggccgggcaactgtgcatcaccctgtttactggttaatagcccttcctctagagatcgccctgattcctgtacctgcctcttgcttccacgttttccaggaagtaccaccaacgaccccttgtacagggtcttgtcagtgtttcaaaaggcctgaaggtatttgtacctttacctgggccagataatacaggctaaaacaaacatccagtgtctgggtttcaggctggaatgatacccactcagtgtggttgagattcctggttatctcagtctgatcagaagcttagataggcagtgctgtgcctttgctgagcaacatctggcaagtaacttattacttgatttggtttggtagataaaatatcattaaggctggggtttaacccaagagatccttgaagatgaaaaagttgagagccactgagctatacaaatacttttcaattttcggtgaattttctattcactgcagggcggtgtctgttcaagcaaggatgcattagacacattcctgcctctgccttcgcttaagtttgtctcatgcaacagtccagggaacctgttttgtgggaggtgggacatggtctatattggctggccaagaggaacacacccctttgagaaggaactgtacacagtttgtgattgaaaatcattctttcagttcctggctaagaagtgcaaggcctagagagagtttttgaacagccccctggaggagaagacagttgatgagaagttagctttagcggagggcagagagttccaaagaggcagtggacattgctggggctcagctggggaactgggctgcctgaaatacagacctgagggccaagagggcattggatgtcctcccctgtgtcaggcacattcccccggagcacaggaagtggctgatggaatcacttcagtgctggagggtgtttagttccacagagccaagcaagcagagaggagaagccatgaccaggctaggctcttcctccagcctcaccacactgggttctgattctctggggcagttcctgaaaggaggctccaggttctttaatgccaatagagcttccttccaggttgggttagttttttcccagagaaaaggacttctgctccattagtttcctgggatctgtgacgtgctggcttccagagattgtgaagggatattgatttgcggctttttgtttcagtaaagtgccaggtgatctgatctccaggggctgtgggattgagcttacaggcagctagaagcctctctcttctcttaatgggttgctatttagaagaagtactataattcagggaagacaagatgccttcttgctctgtagcctggaccactcttaacatgggtggttttggatcctatcaagagcctgaaactcacatcttagttggaacttctgacaagtgatttctcttcattgcctgacatgcaggtggcatccagagaagaaaaagagagtcaggatttggagaagttttttgactctgtattgagaaaggcccaattgcctgggtgatggcagctctgattgttctctagctgcaagatcctgggtggtgttatccgaaagtagtcctgggctctgggtctctattgcctggacaggtgtgtttctcagttcctgcaaatacactggacagatgcagcccacaattggcttcagaacacagaaggctctgaagtcagttgggtccatgggcacattggtcagggactattctctaacctagaatctgatgttggctccattaatttaagagtcttggagttaggaaaacctagatttgaatcttggctctgccattttctgagtgatctggggccagttacaaactcatctctgaaatggggctggttctaccctgcagggttgtggtaatgattaaatgagattcaataagacttgcatccaaagcacttagcacagagcctggcacacagtgagcgctcaataaatggtagctattgttattgtcagtttcaaaacaaggggaagggctcttcatattcatttactctccattagagaaatcacaaatgatttattggtcttttaagaagaaagctaagaggaatagctcatattctttgtaatgtgcatatacagttatacaaatatggtaagatcacagactctggaggaggcagaagacaaacagtgaatctctcctctcccgagacctcctggggccagtgacataacctctctgagccttagttttctcatctgaaaaatggtagcagctgctttccttcctacctatgtcatagggtcattaggagaactgaattaaatgacagaatttttatcaaagcaaatgaaccaacttaatttatggctgaagaggttttgttttttacaaagatacagttaattcaggagcaaggaggtaaggcaagagcgggattttaaagaggccaagaggagctgggtgtctggttggatttcaggatgcccatgtttaaatgcacaggtctgtgcccagtgcttctgggccagggccagtgcatctgaaaggtctgtgcttggctgaccaccccatagtcaggaggcaccgtctgagtgagttatgtgaggaagccttcagggtggcttatggccttgaccacagagcctgctattgagggcacagtgggcatcagtgttgggactgacgagttggatcacaccctggattaaaagagatggtttacctgtgagggaagccaggaaggtaatgagtgtccccaatttagacagatttaggcagatgggaattcagcctccctggagggagctggcttagtgctctctctcttggcttggccaagagagagagagaccaaagcttaggtctcccgaaaatgtttgcccatctaagccagccagctctgccccctgccttggaagccttctgggtcctctagtattacagcttcaagctctgagagccagagacccagccctacactctgctgttgagacaggcaatacggtcaccatctcaggtgaagaaataatggctttccaaaggagattcccatggggcagggcagcagagggtggttcttgtggtgtcagcaaaacaggcataatcatggctattaccttgcagtgtcgttggaagaaatgtcgaggtatcactggtaaggggcttagcactgtgcagggcatgggatttgagggggctgcctcagtattgagggtaggtggctctctcactgtgagaggccctcccaggatggggggagctctttcatacttttgtagggagggggacaccatcctggagcttagagcagtggacagttatacaaaaagctgccagcgaactctgcagctgctctgagacccagctacctacagaatttctcctggaggctttgcattctggtcgcctcttggtccagtctgcaagagggagcattcctgccagccacaggtgtggcagcctgaccaggtgatgagacctccccaggtgttggagatgagatcccagcatgtggttctccaaggctttgagctggagctctgctcctcattggcgatgagactcagggaggtccttagctgctctgaaccttggccattcccttccataaaatggggacaacaatccatgcccttcctgcctcttcactgcattgccaagatcagcatgagatcgtgggtgggaaaattctgtttttttttttttttgagacagagtctcactctgttacgcaggctgaagtgcaatggtgcgatctcagctcactgcaacatccgcctcctgggttcaagcgattctcctgccccagcctcccaagtagctgggattacaggtgcacaccaccatgcctggctaatttttgtgtttttagtagagacggggtttcatcgttttggccaggatggtctcaaacttctgacctcaggtgatctgcctgcctcagcctttcagagtgctgggattgcaggcatgagccaccgtgcccagctggaaagttctttttaaaattgataatcagacaaaaggaattattagtaaggcagaattcctgcttcagaacagaaagaaaagaggacatggaggcccagggagattaaggaatctgctgaagcccacccaactgggtagaagcagggctgggaggctcgggccagggccagggccagcttcatggagtgatggcctttccaagctggaagggaccacagttcctgcctcaccccccacctttacatgggaacactggagacagggagcagagggccttctggtcagcatctgcctcacccggcttctccctgggaaatcttggggtcttttgctggccatatccttcccctgccatgggctagaggactctgggcagcggagggaagctgttgttaagtagaagctccaggagtgcctcagcgcaccacccagttccctgaaaccagcaggcagggctttctttcctctttccccagatgctcttaggaagatcaacttctgagcacttttgggcctgagaggaatggctggcactcagcatgggaagtgcccccactctgaagggtggcattcctgagggttgggttggatgcagggtagaagaagtccctagatattatcagctgatgtgatagtccaccccagctcaaggcctgctttcgctgcttctggaacagcttctcccaaacattgtttttgctggccccttcttaccgttcatgccttagcttgtgtgttgccctttctaagaggccttttctgatcacctcaagtatgacctctccctttatgaccttggtgacattttcacaagttgtaattacagttgtccctcagtatccaccaaggatttgttccaggaccccacagataccaaagtccaaagatgctcaagtccttgacacaaaatggggtagtatttaatataacctatacacatccttccatgtactttaaatcatctttagattacttataatatctaatacaatgtaagttctgtataaatagttgttaaactgtattgtttagggaataatggcaggaaaagaaatctgtacatatgtagtacagatgaattttttttttttttttttttgagacaaggtctgccctgtcgcccaggctggagtgcagtggcacaatcattgcttactgtagcctcaagctcctgggcttcagcaatcctcccaccttatcctcccaagtagctgggactacaagcgcacaccaccacacccaattaatttttttttaaaacttttggtagagactgggtctcactgtgtttcccaggcttgtctggaactcctgggcgcaaatgatcctcctgccttggcctcccaaaatgctggtttacagatgggagccactgtgaccagcctaaaatattttttcaaatattttccatcctctgttggtggactccatggttgtagaaaccatggatagggagggctgtatattatttctttaattgtttatttgtataaataacaaatattattgtctttgcccctaacctgagagcatgggcttagtctgtctcatttacctctttatttccaatgcctaggactgtctctgacacagagcaggtgctcaataaatagttattttattttgtttttttttcgaggctgagtcttgctttgtcacccaggctgagtctggctttgtcacccaggctggggtacagtggtgcgatcctggctcactgcaacctctgcctgccaggttcaagtgattctcctgcctcggcctcctgagcagctgggattacaggcacatgccaccacgctggctaatttttgtatttttagtagagatggggtttcagcatgttggccaggctgttctcgaacacctgacctcatgatccacccgcctcggcctcccaaagtgctgggattataggcataagccactgcgcccagtcaataaatagttattaaacaaatgaattactgaatagtaatactagtgactgtttgttgaggcctgattgttgtcctccttgcttgccctcctagtagctctgaaagccaggtgatgccattatatccccatttcacaggcagcttggtactttcctgaggttgacagctgggaagtggcacagctgggattcaaaccaggcctgtccaactgcaaaatgagaaagggctggatagaaacactgtcttttttttttctgttccaagggatcagctgatgctcttagctccctggctgagttcatctaatcgcagccctttggggttataatcaaattctagtggaggcagacagagcttgtactcccctgatgagagtacccggttgtgggtggcaaccctgggcatgtaccaccatccctaccccgcccctagcacactctgctttaggggtggctctctgggtccttgaagctccctggtgcttgtgccaaagctgacctggatttgaccttatcccagaagtccttcctggcaaccagagcttaccaaggccattgcttgctaagcactatatgaggcctagatgaaaaaggcctttctaggaggggtttgtagtttagttggggagacgagactgtagtacttaacaaggttgaatagcgaagcgggacctaaatgtcagcagtgcctgggatgttgctgccctcgagtgagctgaacagtcacagattagaccaagatcatgtgctgggcagtggggctgcagagggccacatgactctgcccgtcaaagactttccaaaggaccctgagttgctgtttgggttctgttggtatgcccgtccaaccacccgttcagccttggccttgggatcagagaagagcgctgtgaggaagatgggttctgtgagccaggggaggtggggagggttcctggctccacagagaatcagcctgaggccctggccctctgggcttcccacgtgctccctcagctgctgctttgtgctgcctgcccctgggggtgacctcatcggctctgtcctgctctccacaggcctctgctgtgttgggagccactgccttcctcccctcccccaacctgtgggcccacagctcgccagctggcccttgaacccacttccctgcgcctctggctgcctcaatgtcactggggattagtgtgcatttgcggcttttggcggacactcccctcctggctgcagcctcaccctctggagcccagggatgggcttgggcctgggagccccctgaaccagggagcagccctgaccgtccgtttctctattttccctgacgtcagaaggcagagtgcttattcactttggaagcgcactcgcaggagcagaagaagagagtgtgctggtgcctgtcggagaacatcgccaagcagcaacagctggcagcatcacccccggacagcaaggtaagggccttgacagtggctgtggcctggctgcctcgtttcccctcagccagcctagacccttgagcctctgcattgagctgggggccagcctgagcttccaacttggctctgggcaatgagctcttggcaagcggggacctgtgcccgaatgtctctcccccttggcatgtcattgggtctgctgagtgggtctgacagtgctcgtgtagagcgacagagccaaattaagcgtggcccatcagttctgcactctgttcttcggtttgcctatggcaaggtttaattcgggctggcctccctgatgctgcctggcatgcgttcacctctgccattgggtagcctgtgcctgggggcagcacactggtgtttaacattggccccaggcggatgcgatagaggggatgtttgcggcagaagctgttgtatgctgtatagttccatgtgggccagagccaagtagagctgagtgtggactgctggggtctggggactggctggcaggagcaccggggaagattagagactcccaggggaggctgttctgggctgggcactgctcagcccatccagtgcctggggagaggggatgggataggagctggaccacacagccttcccctttgacactccgatgccagccacaaagtacagttatattaccccatttgtgagtcattcaggtcccttcttttgctaaaagtgctggccatttgggaattgggtctggttggctgcaaaagttgctgaggtggttgctctgctggatctgggcgaagaggagagatgaaagaaagctgcagcctgtaacttgctggccttttcacttctccctggtgcagtcagtcccctatgccatgggcagcaggcctatgcagggggcagttggggggcaggcctgctgaagcaggaggtagggaagaggcagttggcagcctcttctgagggccagaggtggacagcagctccccagctattcccgaaaggagtgaggatctgagaattacatcatcttagctgtgaacgttctcttgttttacactagctagtggcaagaataacttggatgagggaagacagtaggaaaagcacggacttctgagccaccctctaccaccaactggcagtgggaacttgggcaagtcactttgctgctctgtactttgatgtccccatcagtaacctgggacaatagtccttccctcaaagggttgttgtgagaatgaaatgagagggtgcatatacgggctatagcacagtgcctggtatgcagtaggcactcactcaaccatagctgtggggaatgcattgccccctgcccagccccaggtggtttgttgcagcactggctggttgccactgtcaggttcttctactgagcagagacctgtccccatgcctataggctgccctgccccactgatcctgggttggtcacagtcagaatccaggccgcttcctcttcattggggtggcctctgggacgtcgaatggctgaacctatgccccagttttttttcctttgggcttgtgcctccttttctgggggaaagagctctttgtgcctcgctctcagagtttgctgactctggagtgtgttagcagcagccttctcaataccttggagaatctctccatcttcaggtttgggaggccagagggtgactgaaggcaggctgtttctgaggcaggttgtggtccctgtagggctttgggcttggctggctgaccctggaacggcccaagggtttgaggcctggcttcagggccacactagaatgtatgggaatcctgagcagagcagtttggacacctcttcaaatccaaactcttcaaacgcgtgttccatggagaagctgtgtgctggacaggagaaggatgaaggagggggcccaagtgctgggacagcctcagaattacctcccgggcctaagaactgggcctggagccacactggcataccccacttgggccaccctcctaagaaggccatgatgtagctgtcttttgtcaggctggccctagaggtctcactgctcaaaattccccatccctatcaccaccatgcacatgcaaagagtcttagcaacttactccttctagacacttatggaatgctccctgagaggaattccagtaaatagattctctccagccctaggtagttctagcaatgctttagcaacctcactgacagggcccgcctggctttccagctggtccacagcattgtccacttgcgctcagttccgtcagttcctggcagcctcggggtgaccaggaacctctttaccaagggctggccactaaggtctccatctctagggcagaagaggaagggccaaacggagcccggaggctggctgcttgctcttcaggtataagggtcctgctggaccgatttgctctgagatggagtgtcgctctgtcacccaggctggggtgcagtggtgcgatctcagctcgctgcagcctctgcctcctgggttcaagcgattctcatggctcagcctcccgagtagctggtaccacaggcacatgccaccatgcctggctaatttttttatttttagtagagatggggtttcaccatgttggccaggctggtctcgaactcctgacctcaagagtagcacacctttgaatgccttttctgtgttctttctgtggatgctccaccttctgctgaacaaaggaaaacactgcctagacccccaccccacccctgcaccacccaaatgcctctctgggaaaagggggtttgtaaggcaactccccaaactcccatgctcttttcaagagtgtctgctgacacccagatgtgggggattctttaaatgtcttaaggaatgtaaagctcttcccaaattcacaaaacgtaataagtgcaatttaccttgaagatgaaatatatgcttgttgggaaggtagagggagtcaggggaagatggacttaaagaacagttgggaggtcactcccttgctgtgggaccttcagcagccgctggctgctgtggtgtcagtagtcccatctgggcactgggcccgtggctctttctatctctccaagctttgtgattttcgtgaaagctgagggccgggggccatctagtatccattttttgtagaaataaatgaactactttctctcttgtctcaacttcctactcctgttcatcacccgctccttccttttcagagctctgcccctctgttgcttcattatctgtagctggggggcgcctacctttcttcttctgcctgggaatccttgtactaaactccctgcatggggactgctgcgaggcttctaatctagaataactcagagctgggcccacctgtggccattcaggttctaagctagaagggagagacaattatatattcttttgattattcaagcaaatatacataataaatgccttctcagtgccagatactggtttagatcctttgggatcacagagatgaatgagacctggtccctgtcgctatggaattctcctaataggagagagatgaggagggcactggagtggtgatctaagcatgaaagccatgcttgcgggtcctaagaaggatccagtggggtcctggctatccaagcatcatccgtgccgtgagcctcctgctcagtacccttcatgtgcctggtgctgggctgggctccaggaagccttctgagaagcatggaaaccaagcctttaggatgagaagggcagacacagtgcagtggggcctggccccattctcagggcaggtcctgtgctccacggggagggacgcacagagcaatccatcaccccctttcctcgggagatcacagtctggtggcagagacagacatgacagatagttcaaagtaacacagtaagcaatgtgacctcaggtgagccagttagcctctctgagactcagtttttgcatcagtaaagtggatggattaagaggcttcttgtgaggattgaactcaggatgtgctttgcaaagtggcatgcaagaggagctctgaactagccgctatcgttctcactgtcatggttttaaagtgctgtccatatgggaagattcatcgggggccttgttcattgaagctgctgctggtgctcggagcacatatgacaactgctccatgtcacttcctggtagacatctgccatattccaggggcccaggcagggaaactgaggcctccttgtctgctctggctctaagacttctcccagatgtgacggtgaggtgcgtgccaccttgtcatctccactggggccactagagacagccctggagatgccagggtgtgtgagtgccttagaaaggaacagaggcaggtcctgcagtcaggcagcccggcctgagtagacagcgagctaattccagttctgtctggttccacagaaactccaccctttcggctctctccagcaggagatggggccggtcaactcaaccaatgccacccaggatagaagctttacctcaccaggacagactctgattggctgagcaaacccaagggcgggactctgcttctggcaacttaaccctttcttgggcatcccctaccacacagtaacctcacctcaactggacctgaaacagaggaccaagatggtgggtctagggtcatctgaagggagtggtcccaagggtgcatgtggatgtcaacagaaggaccacaatggtgtgagaggccttgtgggcatgcagagactggcagcagaaagtcccaagaggagaggactcagaggcttcttccttccaaggaggaggaggaggaggacattccacatctgggcttccagtggtggctcccggacctgccttgggggcagcaggagaggttgggagaggtcaccctgatgaagaacaatgccatgatctgctgctgccagaggacatctccgcccatccactcattttccacctgtacacattggctcattcattcgatggatatttcgggtgcatctactttatgccaggctctatgctaggagctggggatactgtggagaaaaagtcggatatggtctcgctctcatcaagatttcagtctagctgggagtgagcgttaaataagtcaataccaacacacacacgtgcacacacgtgatggcaagctgtgatcatctatgaaagaaaaaacacagatttctttaagagggaattgtacttagagtgctgtgtgtgggggtggggatggggaaggacataacttttaaaccgagacttgtgggctggagaggaaggagccagtcctggacttggggaagagtgttcgcggtggatggaatagcacgtggagagtccctgagatgggaaggagctcagtgggctggaggaatggcgagcaggccagtgtggctggagcttagtgaggtgcaagacacagtgggtgaggtagttgatgtcttgttgatttcattctagatacactggagagccattgaaggcttttgaggaagggagttgcaagtacatttttacaagatccgtttacacataggaggggcccaagtgggtgtgagatcagttagggggctcgttcagttctctaggtgaggactgtcctggtggcttgtcctggatggtggctggggaagtggatgcctgaatgccaggctctggagaagagatgactccctgccccatccccctgcctaccctcctcctcaatggcccctctctcagtggatgtgagtgaggattaggaccttccccacagagccaccttttggccaggcctcgtgggggatagtgggggcagtgctgagttctaggagtgttcctggaagttgggggcagtgagtgctcagcctggcccaggtgggagagttcactgctgcccaggccttagcaggggctgctgtgctgtctttctgtcccatgctgagcattgtgataggaagctgccacacagtgccctggaaactgacttcgcatgctttccatggggcttccgagggccagggactgggctgggggtggcctagcagctctagtggagactgtgctgccgcagggctgaaggaagaccaaccaaggggacagccgtttgagcccagcccactcactgcctgctgcacctccagctggagcccagggttgggcagctctcatactcttatctaactgccagacctagagggagggaagcccaaggctgcaggtctgagggacacggctcatgggcaaaagggtatcaagaggattagagtcacttgcataggaaaagagggtcagagaggctgagggctggctgaggccagagaggttccctgaccttggacattctttgtgttgtgtaagacctcggcatctttagagaaaggttcttgtgcccctgtgagcttgctcagctgctatggccacttgaaccccaaaaatggtggcctagaagagaatacaccccttacttcccacttatcctcctctcaacctaggaaagatcagacatattgactcaacagtctaacaggggatgggctggatctgcccgtgaccagaccaatgccccccacccagcaagggagtaaacgctgcctgaagtgggaccagtgatacacagcatctctgtctgccagggctcagcccgcgggggggatttgtgagaggctgagcagctgggtctgcacagacagcaagctgcactttgatttcatttgattcccttacaaaatgacattaaggggaatgtgaggcacaggagactcgcctgtctgggaaggcagcaagctcatctctcctggacctggtgacctacctctgtctaccagacaggtgcagaggacaggagctctggccacaaagaaatggacagtctgaatgcagcacacagccctggggacaggacttttcacccagcctgtcctgacaagctgctgagtcgagcagatgctcacatcagggtcccaggtccggctgttagggaagtggacatcagttcctggtgggccctgggcagtgactgtggtgagccacagcaccattgctgctctgcctctcaaatcgatcgaacaattaatttggctccacaggctcgagaagatgaaacatgacctgatggccactgctgtccagcatcccagtccatcctagctgtccaggatgatgaacaagctatggaaattgcacttgagagctataatcacgggaagcattgccgagcccctccctgctacataaatcatgctaagaagcacacaatggcctctttcctgatgggctaattgtcttggtttggtgtctcaggcccaggagctgggaagatgggagcacaaccatttattgttggaaagaccatctgtgcaacttgaatacaaagtgattcttttagttccccacacacccccgaccctctgatcccattttcatgttttttttttttttttctttttatgtctcaggctctggttcttttaaaactcttcatctatcctgtaagccatcaggcctggatctctgctggcctgggtcttttggctatttgggggttgggacattgcagaccttttggaaataatgacatttatttatatatgtcttatatttttattctttatttttccccataaattctattaccaaagtcctcatttgtcacacatggcaccaaggcaccaagagggtttttgcaaagtgaaaatgcaggcaattttgcaacgtggaagggctccccacagcgaaagtcccacagtgagagcctaaactttggagatggcaactggggtccccaggcatgatctccccccagcctcccagcagccttgttttatggatgaaagacaccaaggctctgagaagttaagtgttttatcctaggtcacacagctggtaagggccaagcttgccctcaagccaaggcctttgaacctaatctaccactcatttctgataaaaaggtttgtcttttagggatagaagtaagagaaatcaataatctccaggaagaggcaagagagggatatccggcatgtcagaagctgtggcccatcaagctgtagagggaatgcttttaggataaataaaatgagatgccttattttccacccagtggagaataaacttccagaatgcattttcctgagggtggcacaggctgaaaagatcaatagcttcccacaagatttgaaaaaagcctaaaatgagagatcagtttgagctccttaagacaggttctcagggagctctggaatggttaggttacaccccttccccttttgaatttggcatcaaaaggatcagcagacagagtcatggagtgcttggcagtgatggaatattagccaaaggcagagaggtatagcttcaggctcaggctggcttgtgcccagcgtaagtactggaaggaggcctttgacctgagaccagctgagggcacagagagggcctgcccatgtggaacctgccaggttttgtgcgcagattttgctaattgactgatttagtatctcagccctgaataaaggggaatcaaatggatctgatttcagccatctcccctaagagatgcagactcttctccctaaaaactgtttccaggcagccaccagctctcctccccattccttgctgctgtcctatcagtggacagactgccttcttcgctgtcttgctcttggtctcagccatcttgctattgttttttttagcccctgaagaagacagtgcaaccttaccctctatcctgtcttcgccttctcttcctcgaagactttctctgaatagggccatccatcctccaaactgttcccagatccttggttttaaaggtagaatgataacataaggtaacctggtgggcacttacaagatgagccaggcacagggtcaagctttttacctaccctgtctcatctaatcctcatgcagacttacaaggtgtgttacccctgttatacatttactctcattatgcccaatttagatatgaagacgctgagtctcagagaagttaagaaacgtgcccaaggtcacacagctagtgggtagctaggattgaaacttggacagcccagctccagggtacctgcttttgattattttgctatatggctttcctgtaactgcagaccatccaagctggaagggccagggagactggactgtcacactcctgcttaaagaccattgtgggaggccactgtcttcagagtaaagcttggctttccaggctctccttggtagcactacactcctgctttgcacctggagcccggccacaccataaattttccccttctctaaactcactgtgcacattcacagttagggtgtttgatctgcctgacgttgactgccctccttggctgtccctgctggatgcaatcctcaaccttcaaggcttagtggctcctctgagaacacctttctcaggcatgcatcaggagtcctgacttcccccttcgtggttcccagagtactttttcccccttagcacaattcatccttagcatctggatgactgtgagcttcttcggagcaagtagatgttatattttatttgtctttgattctattgttgtccggtccgtagtaggtgctcagtagaggttgtaggattgaattaggctgtccagttcaactctcctatattctagaatttagacaaggaaacaggtgcaaaaagagaagtgacctggccagggtcatgggaaaagttagtgtcagagccaggactagagctcaggtctcctgattctttggattcagagctttttctgttgcacctcagctttgtggagaccagagcatggatctgcacttggtttatgaaggtctgaccaggttcacttcagggtcatggataccactgtgttcccatgctgacactggggaattcccagagggaaaggaagcccagctggagctgctgctgtaggttgcggggctcacctctcaccgagccccttgcttacagagaaaaccagcgagtgattctgaaaatcttgcctcgagtcctcattttgctggtattcaccgtgtgaccttgagcaaattgcttcacatctctgatcttctgttcctttaccaagaaaaatgagggagttgaattcagatggtctccaggagtcatctgattccagaatatcaggatataacaataaagatgaggataaagtagctactcccctcagaaaaggtggagatccagatctagggggagaattggctaggttcttcatcacagtcactgtcttgagacacataggtggtccatggaaacatttccatgagggatttcagaggggagaatgggcagactgcaaagcctcggtactctaataccaggcaaaaagaagaaagggaacaggcattttagttttcacattgaaacagagtgtatgtgtatggccctatgcaaatgttgttcctggtgaatattcatcaatgtactcatcacacataggtatatttagacagaaaggggtcctcatcacagacacccaaattatgagcacattactgcctcctctcccctagaggtgcttcttccagcctcccccattggaggccagcacaagacgggctctccaacccaatatcttccccttccctccttcctttctgctcaggtggctgagtatacacattgaactcttttgtttcaacttcacgtgtatataggttggtgcaaaagtaactgtggtgttttccattaaaagcaatgtcaagaaccgcaattactttggcaccaacctaatatgtatgcaagtacattctttaacctttccaactcccagtccaagccatcaggctaatttccgcgtggaatttgtggtcactggtttgcagtcctttcatttctggtgtggtcagaagtctccttcagactcttcccgataagttgccattggctttttcatcacctttagtacctacccacttttgctgggataacactacccaagataaattcaaaaaaattgtcctaagtgttagtgtgtttctgttttggttgaagtctattattgctatatggttttctactgtttctacttgatggaagactattaagggttaagtaggctggcctaggaagctgaccaccatttataacatacttttgagtgggaaaatgcattcagaggcctgtaatcaatacttaggtggactttgggaatatagtatttattttatgagtgactagaatattggtagaaccatagaaactttgaatgtggagctggaaagcctcctccttcccccactgagatcaattgattaacaagctaggttgtagaaaccaagtgaaagaggcaaaaacttggccaagggcatgtagtcggggacttctgaagattctgctgggctgggggcaggaaaggggtcacagacggtcttagggttgtctcactcagcaactcactgtgttggccttgggaaatgtaagtcactgtgttgggctgtaatggaaatattgagaaagcagctcagctagtggcgtggggagaggttgtctagtcctctggcttatctgtaaattcctggcatgtgcttgttggagcagaatgaatggggctgctgtgttttacctgcagctaggagcatggctggagtggtggagacactccctgtggtctgttctaaaaatagcagtgggaacagagctgaggggaagaggagggggctccttcgggagctgggtggggaggcctcacccccttcctcttcctgccaggcccgatgtgaggaagtcccatggagtcacataattccatctgggagagtcctggagccatcagccctcacaccccctcctcatacaggcgaggaggccctggaggcccggagagcagaaagcactggctggtgtcaagcaagcccagagagaagggcccagttggcaggctgtttttccctggctgtttcagcacagtggctgcaggccttgtgctgaggtttgctgtcactgcctttgggcgcacagagactgggaactcctgggaccggatgtggtcaggcttcctgagagtcgcctggcaggcgaggagtccccagctggcccaccctgagccctgacctcagccagccggctgtccagtgccacacctcctcttgctggtgtcccctcccttgctgacttgtcctcctttctttggactgtctgcagggagggaggacaagggccagcctagatctggcctgcaggacagaggcctcagtggctcaggacctttccctgcccctccccaggaacaagcagaggcagctgaggtagtagcagcctcctgcaggtttagagacagacaggccagggttcaaatcctagctcttcctctcactagccatgggattactgatgggtcacagagcatctgtaaaatgagacaagaacgctgatttcactggggtcttgtgaagatcaaaggggatctgttgtaatgcctggcatgcagtaggtacttaatagtagctcttgttgcaaaaccaagcagtgaacatgtatctgactttctataacccccttccttggggcctccactcatgaggcatgggaaggtgttttttttctttgtttgtttgtttgtttgaatgcagttgactttttttttgttgtattgttgcaaaagtaatccatgtgattgatgtttattatgaagaaaacatttaatacagatgaaccaggagaagaaaatgaagttcatccttaatcccagcacccagagataaaccactgttaacattttggaatgtgtcctgtcaggcattcgtttatacacacatatatcttatttgcaaattggggttactggtgcaatttttctaacctgctttttctcccccatttaacagcgtagtgtatccatgtttccatttcaataaatattcttctacaacatcattttcagtgcctgtggagtatttcattgtgtagatgaaacgtgctttatttaagtaatcttcagttgtttatcattcaggttgcttgcaatttttctttgttacaaaaatttcagataaaaatccttgtacaggaggctgagatgggagatggcttgagcctgagtttgaggttacagtgagctatgattgcaccactgcactccagcagtgagaccctgtctctgaatgaaaaaaaaatcctcttaggtgtatcttggcatgcccagcatccagttcaacacctagtacgcattcgactctaaataaatatttgttgggcgcggtggctcatgcctgtaatcccaccactttgggaggccaaggtgggtggatcgctgaggtcaggagttcgagaccagtctagccaacatggtgaaaccctgtctctaccaaaaaatacaaaattagccaggcatggtggcgcatgcctgtagtcccagctactggggaggctgaggtgggagaatcgcttgaacttgggacgtggaggttgcagtgagctgagattgtgtcaactgcattccagcctgggcaacagagtgaaacttcatctcaaaaaggaactaaataaacaaatatttgttgaatgaatgaatgttttgttagaataaatgcctgttagtagagtttctgggtcaaaggttatatatttataaaatggattattgatcctattgccaaattaccctgcagaatggttgtactgatttctaatctcatctgaattgactagctcatcctactttgcctgggacttttccctttttagcattgaaaatcttgcttgccaggaaactcctcaatcaaatcaagtaaaccgagatagtctggataagaaaatgtttattcctcctcatcattaccaacatggtatattgttacatttttaaataggttctttttttcgttattagagatgttgaatatttatttatatgccttctggtcacttgtgttgcctcttttgggaatagcctgttcaagtcttttgctcatttttctattgggatttttatagtttaattattaattcacaaagagctctttatataataaggatatttgtgtgttagccttttatttttattatttctttaaactacagatgtttctgacttattagtcatatctatcatttgttttagagtagttttattgagatttaattcaaatatcatacaattcacccatttaaagtacacaattcagtaatttttagtgtattcacacacttgtgtaaccatcaccacaatcaattttagaatattttcattatctcaaaaagaaatcatactacttagctatcatccattatttcccccatctcctccaaccctaagcgaccactagttcatacttttcatctctgtagatttgcctatattggacatttcatataaagggaattatataatatttggacttttgtgactggcttctttcatttagtctaatgttttcaggatcatccatgttgtagcatgtatcagcaactaattccttttcatggctgaataatattctgttgtatggaatatcacattttgtttaaccgttcatcagttaatggacatttgggttgtttacaccttttggctattctgtgtaatgctgctatacatatatgtgtgcaagttttttgtatggacatatatttttctcttaggtgtacacctaggagtggaatagctgggccaaatggtaactcatgtttaactttttgagaaactaccagactgttgtccaaagtggatgtactgctgggcgtggtggctcatgtctgtaatcccagaactttgggaggctgaggtgggccgattgcttgagtccagagttcaagaccagcctgggcaacatggtgaaaacctgtctctactaacaacaacaacaacaacaaaaattagctgggtgtggtggcaggcacttgtagtaccagttactcaggaggctgaggcaggagaattgcttgaacctgggaggtggaggttgcacggagctaagatcatgccactgcactccagtctgggcaacagagtgagactctgtctcaaaaaataaaataaataaataaacaaagtggctgtagcattctactttcctaccatcagtatatgagggttccaatttctttaaatcctcactaactctattttttcattttaaaaaattatagccattctagtgggagtgaagtagtatctcattatggtttttattgcattttcttaatgactataaatcttgaaaaatattattgcctttggcgtatgatattcactctaggattatataatattcacttttttcccttttaattttatggtttattttttaactcttaatattttaatcaattgggaatttacttttgcatatagtatgaggcagattacttttcatttttcccaaatagttatttgctccaattcttatgcattatattaggacaagtaccctcttattagttttctttaaaaattatttcccccctcttctcatacatttatttatttatttatttttttgagacggagtctcactctgtcgcccaggctggagtgcagtggagtgatctcggctcattgcaagacccgcctcccgggttcacgccattctcctgcctcagcctccagagtagctgggactacaggtgcccaccaccacgcccggctaattttttgtatttttttagtagagacggggtttcaatgtgttagccaggatggtctccatctcctgacctcgtaatccgtccgactcggcctcccaaagtatttattcttttaaatgaaattcagtgtactttttaattgtagctttataattcagtccttatcttctccctgcccctcccaaaaatatcgttgagacttttattgtaattatatttcaaactatacatttaaaaggggagtattaaaatctatacaatacggtcttctcatttgagaacaggatgtgtctcctcatttatgcaaattttaagatttcccaaagttttagaaagaatttcatataggtcttgcacattttttgttaaatttatttgagggaatttaaagttttaatttatattacaaatgaaaatatttatttggcattatatttggttttttaactggtaatatacatgcacaaaacttgtaccaaaaaattctaaacattactaaactgaataaaataaaacccccattccccaagcccatttccaatcaataattactaatatatgtttgatgtggttcctccaaattttcccccatgcacatatgtagacatatgctatgttttgttttactaaataatatcatattatacatacatttttgtaactcatctataaagatataggccaggaatggtggctcacacctgtaatcacagcactttgggaggctgaggtgggatgatcacttgagtccaggagttgaagacaagcctaggcaatatagtgagaccccatcgctacaaaaaataaaaaaaattatccaggcatggtggcatgtgcctggagtcccagctacttgggaagctgaggtgggaggatcgcttgagcctgagaggccaaggctgcagtgagctgtgatcacaccactgcactccagcctgggcaacagagggaaactctgtttaaaaaaaaaaaaaaaaaaatatatatatatatatatatatatatatatatgtatatataatattatatataaatatattatagaaatatatattatataattatagaaatattttcgtggctgggcgctatggctcccacctgtaatcccagcactttgggaggccgaggtgggcagatcacctgaggtcaggagttcgagaccagcctggccaacatggcgaaagcccatctctactaaaaaatacaaaaattagccaggtgtggtgctgggtgcctgtaatcccagctactggggagcctgaggcaggagaatcacttgaaccctggagacggaggttgcaatgagccgagattgtgccgttgcactccagcctgggcgacaagagagaaactccgtctccaaaaaaaagaaagaaatattttccatcagcacctaaacttctccctctattttgaatagccagtggaccataatgtatttaatttattgatgcatgattagattgtttctaatgttttgatattctgaacaatgttgcaataaacatcttgccgcacttttctgttaggagagagtgtggcacacactaccgaagtgctctaaaaaagctttccttctgtttacacatgtcatctccccaacactattgttcttatcctattttatagttgagaaaccaaaggaacagaggttaagtacatgtacaatttgcattcctactcacagtgaatgagagtgcctgcttccctacaccctgcataaaatggaatgttattgcttttaattctttgttggtacaagaagtgaaaaattatatttaatcttaattgacatttatttcattattagtgaggttgagattcattttgttttatttttggagatggagtcttgctctgtcacaaggctggagtgcggtggcgccatcttggctcactgcaacctccaccttctgagttcaagctattctcctgcctcagcctcctgagtaactgggactacaggcacacgccatcatacccagctacatttttgtatttttagtagagatggggtttcaccatgttggccaggctggtcttgaacttctgacctcaagtgatccactcacctcagcctcccaaagtgctgggattacaggcgtgagccactgcgtccagcctcattttatgttgatcagtcacctatatttctgctttggcttgtcagttcattcatgtcatttgcccagttttttactgaggcgttatctcatttgtaagagctctttatgtggttagactattaaccatttgcttattatatgggttataattatttttctagtttgtcatttgccttctaactttatagtatcttttatcatttagaagttaactttttttataatcaagtttttttggggggttgagagcacctatattttctaaggtctttcctacccctagattatgagaaatattcatctaaattttattcagctacttttattcttttattttttgcatttacattttaaattcatctgcaattaatttaatgcctggtgtcagatggaactcttattaattttttcccccaaatggtttgaccagtttttccaacccgatttttttgaattgtctttcctttcttcacttatcatagaccaaatttccacatatggatggtttggtttctaagctctctcatctccctctttgatctgtctattcctacatcaggttagacttaatgactttagcttcagaatatggtttagtagtaaacatcccaaggccaacccctattattctgcaaaatttcctttggagttatacaccctaattctagtctgctagtggctttacccttacctttgtcacaaacatatttcaacatcaggaatgacaccagatccatagtagcctgtcctcgtggcctctaacccataatgatcatgtcggctggaccatacttctctgctttcctccatacctcctaggtattgttataattgtctggaatttcggtttccggttgtgactattttttttttttaaagacagagtctcgctctgtcgcccaggctggagtgtagtggtgcaatctcggctcctgcaacctccatctcccaggttcaagcgattctcctacctcagccttctgagtagttgggattacaggcgcccgccaccacgcccagctaatttttgtatttttagtagagacagagtttcaccctgttggtcagggtggtctcgaactcctgacctcgtggtctgcctgccttggcctcccaaagtgctgggattacaggcgtgagccaccctggccggttgtgactatttttaaacattagcactattctgttttaagaattatttacttaaaattgcacttaactttcagttatcagtagttaaggctctaaatgtttccgttttcatggcttgcctctgtctctcacataccacgtcatctcattcttgacttctcgattttaattcacttttgtctgtagagctttcttgagtaatttttccagaaagggtctgtgggtggtatcctttcttatccttgtaagcctgaaaacatttgccctcatgtttgagtcatagtttgcttgagtagaaaattctaagtgaatcgtccttctctcccagaagcctgagagcagtgttctgtggtttccccagtatttagtgttttaagagcagtttttccttgattctctaaaatttatttatggaaacaaccaggattcctctttccaatctttggaattcagaaatttccccagatgatttctagttgtttgttttcttttggtaatttttcctggtcctaactaggtaagtcctttcagtctgaagacccaagtcttcctttcgttcagggaaattttctattaatttaggaatggtttctattctgtgtgttcaatctcctctttctggacttcctactacaaataataataataataataatggtgcctaacattaaagcgtgctttctttctgtgataatatataatcttcccagcactattgttattatcctcatttcatagatgagaaaacaaaggaaaagagagattgagcagattatacaaggtcgcataattaggaggtgcaggccaggttctaatcccaagcacctggctccagagcccgtgtccttagctgctaaactatactccctgcctgtcgggtcccaaccccagagcccaccctgcccttccccccagcactctgtagtgacaatgttgagtgtcgacaggcagggactctgtaatcagtgggggaaagcttggggatgctaggatgatggatctgaaacagactgggctactgaggccagagaggggcagggattgtcagaggttctccagtgaatttagagttgggactcttccctccctcctcttcccttggtctcagccacctgcttcaggcctcctctttgtccctgggactgctgcattgcttcttgtgggtctccctcttcctactcctgtccatgtagtcacctctgtcaacagcagctgcgatgactcttcttatagaacacacgcagtcaccttcacactgctgagtgtttgttgaatgactgtatgagtgagcaaagaagtttacagtgcctaatgtgtgtcaaacactgtgctaagtactgttgatgcagtatgcattagtcagcaatctaccaattgcaagtgacaaatacccagcttccaggagtaaatggaatttactgggttagggagggtagccttcaggcctagttggattcagagccttgagcaatgtcactgagaaggcctcagcctcttcatttcttggttctatttacttaggtgttggctcactcccttagtggtagcagtgctgctgccagaagggccagggttatggccatggccttggagttggactccctcaatcatttcatcaatagtccctgggcctgatcctcattggcccaagtaggatcacgtgcccattccagccactgaggacagtgggatgggttaaactaatggactgaggcctgggccatatgcctctccctggagtgggagatgggttggttccttgtgaatcacctggcttgagaatgagagagggaaggctagttcctcaagtgaatggggtctggtcaggcagatctcagatgtcgtctacttctcggctcatcaaccagcatggtcctcaccccacagagctgacagtctaatgtggggtccagtgtggggcaaggacaccaatcatgaacagcatatgaaaaatcgatgacagttgtgccaaagggcctaatgagagcgcctactgggaggacctggggaaagtttctgaggcaggggaggcttgggatgtaaggattgttctaggtggggaccctaacgcaggccagcataggtgggaagacgaggaaggggaacagagcatgagatgaggctgaggtgtgttcaggatcagacagtgctggtcttgagaagctgtgggaagaagtgtgactttatcctgagtgcaggggttgatgggtgttgtagaaagctgatgctggcctcatagagaatggtgaggaggaaggcaagtcgagaggcagggagcagtgtggagctattggcctcggccagggagagccgatggttgcttggactagggctgaggcaccagggattgagagaggtgagagatccacaggatgtatagcaggaggggtctgcaaaattctgtgattaattgcacggggagtgtttgggagaagaatggtgctcaaaagtctagctcaggccaggcacagtggctcacgcctgtaatcccagcactttgggaggcctaggcggtggatcacttgaggtcaggagttcgagaccagcctggccaacatggtgaagccttgtctctactaaaaatacaaaaaattagccggacgtggtggtgggcgcctgtaatcccagctacttgggaggttgaggcaggagaattgcttgaacctgggaggcggaggttgcaatgagctgagattgtgccattgcactccagcctgggcaacaagagtgaaactccttcctaaagaaaaaaaaaagtctaggtcagggaaacagatggtgccattctctgagctgggagcagtggaggggagtggtttgggtggcaggatcgagtcccactgtatgtgtaagtatcatgatagggtccaagttagtgagttctcatgaaacaaagccatttaaatcagggctccttaagctacctgtggtgaggggctttgacattttgtagcatcacactgcatgtgatttattatgcaggcttgagaacacctgagctagcccatgccctattcagtgagaccagtccactcatctcatgcttagaggtggcaatgtcaagttgaagttctttaaacacaatcaatcttgctacctatctcactgcagactggtaacaagcagcctgtgaacccatatgattttgcagaccacattttgagtggactgatctagttcaaccccagtgcattttagagacagggaaactgaggcttggaggtggtgggggggattggccttgccccagggttcgcagaaggcagcagcaaagttagcatttcagtctttcccccactgaccctttgttttgatggcttgggctcaagcccaacagtccaaacagtgggtggacccaggggagtgtgtggagaactgtttccagcaaccaaggtcacaggcctggcctccccgtagctgagtcagtggctctgtgctgaacacttcccaggaacatgggctgacaggacacagcctggccctggagctggcacaagcacagtgggtcgaggattgctcccaaaagcccgaagtctccggccagcatgtggctggttggaccggagccaggaagggagacagtcatggctcccagccatcctgagctgctacagctgcccaaggtcagactgatactgctgaggtgactgcaaggcgtgccccaggatggaggcagaagccagccagcagcaggcctctgggctagctctgtagggggacatttggtctcctggcttttgctgcgtgtgggcttctccttgctgggttgggagccaccgtttccattagcaggttgggaatcatccattgcggtctcaagttgctgagaaagaggcagatagcaagggggagacatttggggaataagagattaagggcagaatatacagttaagagcatgggcctgggagccatgctgcctgctgggcttccgccttgtaacctttctgtacctcagtttcctgatctgtaagctgggcatgatgagaatagcctattcatcaacaaatggtaatgattctcagctattagtacacgccaggccctcatctgttagcccctcaacaggtgttatcacatttaattttaccatttacattaaccttctcaaggtgaattctgtcttttcacagatgatagcaacaatgacatcatagcaataacaatgatggctcttatttattgagcacttactgtgtaccaggcattccacatacaccacgtcgtctagtcctcctcagggtccgttgaggcccattttacagatgaggaaactgagactcagagatagtaaagggacttgcccaggataatttacactcagattttttagacttcaaagactgtgctctctctaaattccactgactgagctgattcctttagtgagagggcctgaaggggcatgggactgtccatgggaggggaggagtagggctggggccactggacaaccacttcctggtctcattttagagatggaggactgagatcaggaaggggaacgggcttaccctgggttctgcaggccacaaaccacagctccctgtgaacttgaacctgaggatacctgctctgtcttaccccaccccaccatttgtgtcaggtgccccagaacaaggcccgtgccaccaggaagagcaagacctacaccaagcaagcaataggagaatgtgtcccctgcccaggtgctagggtcctagaggccaaaacacagcatggcagcccccgtttgcagcatcagcggcttcatctgccatgaccccctccaagttccatcccatgggcgggctgctccggccagctctgtatccttagttcctagtaccggctccggcacagagcagggattcagtggttattgaaataactaattaacatttcttggccgactctgcagtggggagggcctttttgcatagagtctctagactcccaaaccagggctgtgagccccaggaagtaaaagctcagagctttctaagtgagttagcagattcaaagcttggactggggtggccatatacagacacttccatagagtttcaaagagcagcctggggtggtcactttcttctgcagtgagttgggacagtggcagggctctgcagaagttgaagccggtgtgtacccagcacagtcttggggtatctggggatgatgaaagctaagcagcttctggcaggggcaaggggctagtcttactctgaagtgctctggaattcctgggaccacatctttccctgacttctctctctctctttctctttttttctttttgaaatggagtcttgctctgttgcccaggctggagtgcagtgatgtgatctcggctcactgcaatcttcacctcccagattcaagcaattcttgtgcctcagcctcccaagtagctgggattagaggcacatgccaccatgcccagctacttttttgtatttttagtagagacgaggtttcaccatgttggccaggctggtctcaaactcctgacctcaagttatccccctgcctccacctcccaaagtgctgggattacaggtgtgagccactgtgcctggcctcttctcttcccttctcttcttttctttttctttctttcctttccttttcttttctttcttctccccctctttctgtctctctctctctctctgtctctctctttcacggggtcttgctctgtcacccagctgggagtgcagtggcacaattatcacggctcattgcagcctcaacctcctgggctcaagcgatcctcccacttcagcctcttgagtagctgggatcacaggcacacagcaccatgcccagctaatttttaattttttttttttttttgtagagatggagtcttcctatgttgcccaggctggtcttgacctcctgggctcaaatgatcctcccacctcagcctcccaaagtgctgaattacatgctcgtgatggggtcttgggagcataaacccatgaggtgcattggtcttcacgcaatggaagcagtaaaggaagacagcggaaatctcactgtggtgtgggctgtaggggagcagcctgtctctggcacctggctgcatcccaggctgttgctgcatcccccctggggcctgtctaaagacttgggctctgcttgggggtactgtattccaaaaataggaggtgggtccctgctgaacctcgctggtcctagccctgggagctgctgccaacctgtctgaacagtgtggagtttgcctgtgtggttgggctgtacagttctctgtgtaactgatgggctcatctgttccatgggctgccctgcgccatggtgcaggacacagtggaaagtgaagtgggcttcatctgtagccctgaacttactagagtgtgaccttagtctctctatgcctctgcttacacatccataaaatggggatattagaaatcatatctgaggctgggcacgtggctcttgcccgtaatcccagcactttgggaggctgagacgggcagattgcttgaggccaggagttcaagatcagcctggccaacatggtgaaaccccacctctactaaaaatgcaaaaaatcagctgggtgtggtggcgcacgcctgtagtcccagctactagggaggctgtggcatgagaattgcctgaatccaggaggcagaggttgcagtgagccaagatcgtgccactgcactccagcctgggtgacagagcaagactctgtctcaaaaaaaaaaaaaaaaaaagaaatcatatctgatagggctatgaggattcaatcaatcagtccatcaatcagtaatcagaaagtgcttagagcagtgctgtcatgtgtcagataagtgtttgttatgtatgaaatatgtggatcagtgattggggcccagttcctgagtacccgggtgctgacccctgggcctgtgggccacctagatcttaccactctctagatcccagtttctcctgtactgaacagcaccatcatttatgtacctctgagaagcactgggatgtggtgaacagagcactggactgggagttagcaatcccagccctgccactcagttgctgtgtttccttgggaaagttactttccctctctgggcctcagtttcactgactgtaaatgggaaacaacagtgaaagatctccaagggccctctggcttagaaagcctggctgccagtgactcccctatcctgccctaggctatacactgggaggccccccagccctgttgatttgtgtctggagctatgggaggcagagggcagtggctgccccagggctcctccagccatgggatgctctcctatcctggcctggcaggctctgggccttggggcactgagctgctctaccctttcctcaccatgctatggtccagagcattgatgaatgtattctggactcgttctggactcagcacactgggttggcagagctgctttgcccatcacagcatagggcgtaattttggagtcattagtctcactccatggctaatgtctgcctccctcactggactgtcagctttgtgaatgcagggccctgcctattggttctctgccaatccccagggcctaacacagagcctggcacagagtctatgctctgtaactgtttgttgattgaaagaaggtgacaactcagctgaagctcgagggcacctctgacgtgaaggaatcctatattcaggctccccaccctaagaaatcttatcccacacaccagaaattccatcctagaaaccagccagcctcattggtgattgtttagctccatcagaattggccatctcttgagactcacctccttagcttcccaggccaagggtgaatcctgcttttcaggagccagcaggatgacagccttccagtctagaaggttcctaggccctgcaaggactgccttggttctgcccccagggacaagatgaaacactggttggagtttgtaagtgaccaactcagaggagggctattctgagtcgacccgataaagaatgttttcttgtagcagtgtgcatgtatatgcttgtgtatgtgagagagtcaggaatacagagtcagagatagacaggggcagggatacaggcagaaacatcccgagaccctggggggtctctaccatagggagagaaagagacagagacaccgtgcttcagcctaggtggccaaggtgggtggggtgggcatgggaaaatagaggctccttctgtccattttttctgtgccatcatcccaggatgcctgctgctctggtgggagccagccacaagttgggcattcccaacttgggcctcagggacagcccagggtgcatttgtcaacatcatgacaaactgcagcaccagagaacagctctgtgctggcacagcagcatcttgcagttgtctggctgtatggtggttaagagcgggcatggtgagtaggagcaactagttttcagtcctggctatacagacaactggctatgtgactgtgggcaacttcctttgccattctgtactttggactcttcatctgtaactggggtaatcatagtcctcccctcctcacaagctgctggtgaggattcagtgaattaatgcaggcagagctctgggaacagggcctggcacggagttcatgctcaagaaagggtagccaagagccagctcagagaatcctctattcatcccacaggtgggcaggttaaggttagcagcctccttttacagatgaagaaaccgaggctcagagaggggaaggaacttgctcagtgacacccaattaaccagtgctggagctggaactggagctggggaccctctcctcccagtccagggcttgttccactgcccccgcagttcctccttggggatgtctctgtcattcagggctgtaactctcattatagccaatattactgtaacaggatgttacagtccaaactgccctcccagctggctgtctccgggggaggaagccccaggttctctttccacataggattctgcagagtttagcattcaaagattcagctgtgtgctgggaagggactgaagctgccaccccccaccctgggggcagtcgcattctggaagtcagcgtgtgctggctgcaggagcctgggttcagttgcagcctcccactgggacaggaacagcgtcggggtgggggtgtgacagggaagcctcggtgcctcggtgattggcttggtcttgcagggagcggctgccagcaggccggctggaggcggctttgcgctgccccagcctgggagccctcaggatgtgtgtggggtggagcctgctagggatcccagtgccagggggtgccgttgtgagggatggacgcctctcccccggagcagcactttggggccagcttgggccctggggatgagccacaggggacccacagcctatgcgtgtgagcatgtaacccgggagccagctgggcccctcgcggggtgggcagaaggacgggctggcccaggaccctcttctttgagacatcccggactccatctcggatgaaagtgctttgagaaaccacagagttttctgtttaatggaagaaagaaatccagcctctctccagagtggcggtggccggctagacagggtgtgtgtttgggaaaggcgctggaggaggaggaagaggaggaggacaagtaggaggaggaggaagaggaggagggacgggtgatgcaagggttttgaaagcgctacctagatgtgggaggtggaacctggtcatttggttctgcttttcctagcaggtatcgctcccctggggaacttgggtaagtccataaatagctctgctgacacaaaggagctctgtctggggaaggcagccgcttgacacggccgccaggagctgccacagccacggccgcccgcctgcgggaggagccgggtggaaacctgggcgggcgagctggcaggagcggcagccaggagtcgcctgggtccctgctggagtatgctgggtaggtaccttggtgacaggactgtgtgtgtggtgggcgggcatccaagccaccctgtgcccctgtttctattgtttcttccccagggcagccattgataggcatgttgcaaccaaaccatttgtgctctgttctgagatagctctgtgtgtgtgtgtgtgtgtgtgtgtgtgtgtgtgtgtgtgtctgtctgtctgtctgtctcaggggctgggagccctgcaagttttgggggatgcttcctctgttggctgctccccacttctaggctggacagccagcttttctttctcagagaaacaagaaatgtttggtggccaaaaagtcgggacactgcatgggaggggagcgctcagccagcagggttggctattgtatcaggggtgctggccgcacaccaggcaccagggatggaagctcgtgtctagtttcactggcaggggaagaggtggtctctggaactagtctcagcgggttgcctttggtccctgagacggcctctgctgaaacgtccactggaagcacaagcaaagatgctttgcctctgacctccaaccccatgggagagggcctgcacctgctcccttggctccagctgagacccatcaggcagggggtggtggtagagacaggctcacaccacagagctggccactgtgagcagacagaggctaattcttttcccagcctggagggtccacatctctattcttgttcccaggtgtccaggaagaacccttgaaccctaggactcagggcaggaggataaatctggacccagaaaggggaggagccttgtccaagtttgagcagcaggtctgtggctgagcagggaccaggatagagaacttctgcctcctagaacagcaagaacaggacatgtgggaaaccatttccctgacctgaactaagtattataattcagcttcaaatctgaccttcctgacctgagaggcttggtacaccaggccccacagcgatgcttgaaaactttccacatcctgctgccctcaggccttctggctgggtggctatctggcgtcctctcccagtgctagagtgggtacatctcctcaagggaaggagccgcagaggctgccctgctggtgcctgtgggatcccagccagggcactgcaggcatagtcaaagtttccaccaaggccccttgagtcctctgtgcccagccaaggggcacctcccctcttccccagccctagcacatggtgtggcttagcctagggcaggcccttcagggagccgagttccacaacagggctcactgcaagcccagactggcttctgagaagcaggcagattgtgaggatgaggcagttgaggcaagtgaccactcctcgtgagaagtctccagggctttgagccagaaattgttgatgggacttctgattataagtatgtggtatcagtgaaatcattgcacttccaggcttccttgcctttgcaaatgctgttccagctgcctggaaacccctcccctcccctcccctcccctccccctccatgtcttattttatccaaacttccacaactagagcaaatactccagccagaatgagtctgtccattggtggtggcacccatggatattgctttgtgtcctatgtatgcagaatctgggccttattcattccttagtcgcaaggacctggccaggggcctggggcatggttggagaggggcgttgcattgtcctggctagggcaggttttctttgaggacaaacagtgacatgcaagtcagctgtgtccgcccatctcctagctctgtgcctggcatagagggcctgtcggggagcccctttaggagaggcctaggctctgaatgtcaaagttgcatccatagggccaagggatggggctgggtttgataggaggtgaggcggggagaattttggcttcatcctggcggagaccatagggagaatccactcaggggtcatgctgggctaggtggaattcacagcatagcctgggccatggagggtggaggggatagccctggcttgttgaaatgcaatgctgaaggacctttgcacagactacaggggattggagctcagctccctggaccctcttgggatggtgccaaccagagtaggtctggggttattgatcctcaagccagtggtctgtgtggctccctcagaagaggcacagctgaagagagagtgcctatccccagctgggtccctgggggccttgagagctgcttcccattggcctcttaaggccctggagatggcagtctctttgccttctattaggttggtgtaaaagcaactgcggtttttgccattaagagtaatgtaaaaccgcaattacttttgcaccaaactatagatagatagatagagaactgaggcaggagaggaaggacacttgcctgaggtgacatgcgactcagcaggaaatcagggacaagaactcaggttcccctgcccaggcctctctgtactgcaccaactggatgtctcagagtatccaggtttcatcttggggctctctttctggactcaccagtgacatgtcccttttggaccttcgggctcactgactagagccctgctatcctctgggaaaagcagcatgtgcaatagacaaagccccttggtcggtgggctggagactgcggcaccttctcgtcccttcttactgatgatttcaggcaaatatgccttgtttctcacctcagtttctcctttgtagcaactagggactggaccaagtactgccaggtgccttccaaatatccagttctctgattctttgcaggccgtctcctcttcctggcttccaaaagtcaatggtcagggccagggcttggtgcagcagagaagcagcccccagcctgttccccaggcgcctctgggcaggagccttcgcatgcaagctgcagcccaagccgaagctgggaggtttgttgttgtttgtggagccaggcagtttccaagatgtcattgcttagggaaaaccatcattcctcccaggaataaacaaggctgcttatggctcagccccctaagcctggagaagctggagccactcacagcagaccagccaggctcagcctcagggagtgctgcctgcccctgcacaaccagctgtaccctggcttccaggattggagtggggatgggggcaggatggtgggaggtgtgctagagccataagcctcttgggagatcagagcttccgggcacagatgagagggaagagggtcccaggacatgctcttccttctggcagtgggcctaagtcatcactcgagatgtgtggatagctgccaggtatgctccagatggcccagggcttctcccctctccctgccctccatgggccagcccgcttgcacctggtaccgtggctcaggctgctgccggagaactgtcagcggctcccaacttagaaaggggggtgtgtatttggaactgggcatgcttttcgccacatagccagggctctctgtggtgtcctcagttacctcttactggggttagccttgggcaaatagcagagctcggggactcagggaagggtggcagagggtaagggaacaaggagagaggcagagaaaggtcttggcagtgcctctggggaccacatggctggcaggaaccttgacagcaggccgaaggcagccaggagaaggactgtggaatgggaggtggcatggctatgccacccctcaagtcaagggttggaagcaatgttcagccaggccatgaaatcttcacttctcagacctcacttcctgcagttcccagttgattcaaatagcagcagctctgtactgtcctctctgcctgtctcccttccgtgtctttccttctttccttccttccttccttccttccttccttccttccttccttccttccttccttccttccttccctccttccttccatgtgtgttaagcacctactgtgtgccatgtacttacaaattactagtggcatagatctaaaaggcccaatctttaatctagtgccaggatgttcaggtaatggacagtaacaacacagctttaatggagaggcatggggtggggaggggggtgctgtgggactccccagggaagcactcagttcagcctgggagcctcagcaaagcttcctacaagaggtgaagctgcatgtgattgtacagatgcttgcccattgaagagcaggtctccatcccagtctatccacccctcagaggtgtagacatgtttcccgcctatccatggaaattgcttttgtgtgtccagccacatgctcctccttgtctagggaggttgtataggaatatgggctctggacttgagggaaggatctctcctaccttacagtcttgtgctcttggacaagaatggagcttctcctgccttcatgtcctcaagcagtggtctagcctcctcgagttaaatgagataatagctgtaaagcacttagacatgtttcatgtgaatggattctgtgtcctgatagcagtgggagtgccactagcgcccatctcataggtggctgttattaaatgcagcgatgtaggtgaggtgcttggcgtggatctgacactgagcaggcattcaggaggcagcgcggcagcgttttgctggagggaaacagttggaatgcgcaatcagagatgtgtacaaagcaaggagctcaccgagaagcagtgagcctcagcccagggagcagaagaggagacactgggatgaggggttttatttgtttttaaaataaaccttttaaattgaagtgcagcatacttccagaaaaattagaagaatacagccaatgaattttccacaaagcgtacccccatccaggtcaagaaatagaacattctggtaccctaggaatccccacaaataaccctcttttagttactatgacctcaaaggtaaccccgtcctgacttctttttttttttgaggcagagtctcgctctgttgcccaggctggggtgcagtgcactgcaacctccatctcccaggttcaagtgattctcctgcctcagcctcctgagtagctgggattaccggcgcgtgccaccatgcccggctaatttttgtatttttagtagagacaggtttcactatgttggcctggctggtctcgaactcctgacctcaggtgatccgccctcctcagcctcccaaagtgctgggattacaggcatgagtcactgcacccggcccttgtcctgacttctctcatcgatgagcgtagcctatccttgaattttgtgtaaatggaatcattgggtacatattatttcatgctgacttcttttgatcagcattttgatggcaagattcatcaataatattgtatcaagctttattttgtttattcttgttgctctgtggtatttccttgtatgaatataccgccacagtttatctaatctactgctgatgaacatttgtgttgtttacagtttgaggctataatgaatggtgctgctatgaatattcttgtacttatcttttgatatactatgtttgcttctgttaggtgaatacctaagttttgcaattgctgagtcatagagttgtagagagttagctttagtaaataccatgatattattttccaaagtgtgacaggaatatactccctttaagctgtacatgaaagagcctattattccatgtctgtaccaacattattggtattagatattgtgatatctaattgtggctttaatttgaatttccttgatgtctggtgaggtcgagtccctttttcatgtgttgattagccatttggatgacctcttttgaaaagtgcctgttcaagtctttcccccattttcctattggatttttttttctgattaacttgtaggagcttaaacgatattgtagatatgtgtttattgttggatgtgcacattccaaatatctcttcccactctgggatttgccttttcactctcttaagggtatatttgaagaacacaagttcttaattttaatgcagtccaatttgttaatcttttttcttttatggagagtgtttgttgagtcctgtttctctgcttattacaaggttatggacatatacttttatgtattcttttagatgttttatgtttcatatttagatctaaaatccacttgaaatagatttttatccatgtatgaagtagaggtcaagactcattttctctggataaatattcaatgtattcaaaatccatcctgtctcactatagggcaatgtcacctttgtcagaaattgaggggcaatacgtgggtgggtcacttgaattttgaagaatgagtagagcttcagcaggtggacaggggaggggaaggtgctctaggcaggacgtacagtgtgagcataggtttagaggggcctgagggtagagtgtagcagactggctggagggaaaagaggagaaacggtgtggtggagaggttggcgggggcagaacacacagggttagaggatgggactttatcctagagggatgaaggcattttgagcaggagaccaatataggcaagttggtgcagggccaagggagataagagaaagtctcatgacagagggaggcaggagggtgggtttggagaagactgtaaattcagccaaacctagccctgacatcacccccaagcagagatagggtgtgcctgcctcaggaggcagcggtgaggctgagtgtgcctgaggctcgggagggtgaccttcggccacagggttgtggcttagtctcatgtccacatgtccactccagtgtcctcgagtgaaaaagcctcttttttttactggatgggcaccccaccaccacccagtgcccccagcgctgcaggccctgaaggaggagggcagtggggcagactggggcagacagataaggcaagggtgtgtatctggaaagggggacctttctgttcctcctgcccttgatgcccccacaaggagacctggctatgccttgggccctgaactctgatctttctaggctagctgagattcagaactggacagacatgctgggaagagcaagacccagtgaggggagtgatttggcccaggccatgcagtgagccagactgacccagcctaggggcaggctgagcacagactcatctgccttctcagcttccaagtttccccccctgaaacctgcaactaacaggactcctgtcctaggctgctgtaagggtcagaatacgtcaagtgccctgtcccggaattggatgcaggagagggagctgatgatgtcgatgatcgtcatgagagtaacaattatgattacagaaattgcagatgcttattgagcacttactaggtgccaggccctatgctaagccctccccacagagctgtgatgtgggtactcagtattcacattgccattttacagatgaggaaatcgagcctgaataggttaagcagcctgtgcaggtaccttgacgtaggaggtggcagagccagggtttgaagcttgatttgcctatctccaagccccagttgttcatcagcaataggcttccctccttccacctctggctttcagtcctccctattctcagagctgttgcttggagtaaaaccttagtttttgggttggtccctggtgcccactcatgagagagtcaagctgtggagaggaaggcaaggagcagaggggcaccaccatgggctactgtgtgccaggcactgcctccatatgccccgtagcagccgtgaggaagcggcacactggctgtgagggaggcggcacatggataggaattgggattcacccccaggccctcctgcttccaaaggctgacctcatgactgcagtgctatttgtgtccttccctgaggtcatcctggcatggcagagcttctttgattaacctagcagaaaacatcacagagaagccacacgcttctagctctccccacctggaaggggaccctgggagggagaggatttgggagggtcactgggtgtacagaattctgcactgcccctcccaacaccaggtgtcagtctcctgcccctcagtctccaaccatgtggagtccgagcggggcccctgcgtctggtattgctctccactgcctagcacagagccaggcccaggtttgtcctcaggaagcatcctttgaaggaagggaaggaggaagtgaagacggcaggaaaggagatcacagaggagtagaaagagcagggctttggagtcaggcagaccatggtttcaattctgactcttccactgacttgctttttgatcttgtgtaagttacttaatgtctctaactcctagttttcttattaaaaatgatactgatctcataggattgttggaagtagagcctaaagtataaaacaactgtcacagtgtgtggcatgcagtagatgctcagttaatgatctctctctctcccctatctttgtcatcattatctgttttgaacacctctagcttcaccttccttacctctgcagcgctaagtaaacattgctttcagggtaacgttggaattccttaaaatatccatgctcctgcctcatccaaccacctccacttccttgaatgttccctgctggctctggctcagcctggaatatcctgtcccatcttttcccccctattacctcctcccagagccatcctagttgtccctgctgcctctacttccacagcctcctagcatggtagcaggtgggtgagagatggacctggcatctccaaggcagagaacatggcttgttgctgtttggcagcaatagccaacacaggccctggcgcatggctgcagctctgtaggtatttgctgagtaagtcttgggggaaatggtgtgaataagccagacatgatcctgatgagccaaacaggacctgcccggggccatgacagcagggcaggctgggtcttggcaggggagcagagagccttctagccagggcatccgaggcagattgaaccagtgctcacagggatgggcaggaagtagacttgagggatagagagcttagggaaatgagaggtcccagtacacacacacggagcaggcagaaaagcagggtgccgggtgggaaggggagtgaggatggatcccacaggcagactggttcctcagcagagccccagggggcctggagttccccttctcacaaggcatcagtcaccactagctcaggaagaagctaggaacccccctgctctcaactctcaactccctgcttttcagagaagagagctggaggagtagaaggggtgtttggggtggtgggtggggacaaagactacgagtccacccatgttgaagcagtggtgtcagaaatggaggcgagaggagaagggacctggtgagggggtgacagggcagcaccgtgctgaaacccagaccccgggagccgcctccccgccctgggagaagctgggcatccaggcaggtggtggtgggtctccagcaggctgcaagcggcatgtccttctggcttggtcaggcgatagccaagagtaggaaggttttctgagggggccctcgtgtctcctctttcctcagggattccctttctgtgagtgttggctttgtcctgagagtccctgcgcgggggtgagctaaccttctgtgcctcagtattgctttctgtagagtgggtgcactccctgctgtggtgtgccgccctcctgagcctctgacagaggagcttcagtctgtggtcgaattcttcctttgcccctctctcctcctgcagtggggcctctgtttagggaacgtgaatgggcagctgcctccagggaacttgccacctcccccgtcctgctccaaggtcatgcctcttctgcacaggctccccactatagagagggttctatgtgttggaactggtcctgggcgaggttctgggctggattttagtgctgattctgttgtatgaccttggccttatcacttcccttctctgggcctcacgtaacagacagtcaccttgcctgttacctgacgccactctccagaattgtctcgtcagtcagaaagaagtaaaaaggcctgggccttactcctagggactgtgatgcagtaggtcttagattgggtccagacaggcatttttaagatactcctcaggtgattctaaagtgtacttctccgttaagaaccaatagtctaggtcggtgtttttcaaactttaatgtgcaaatgaatctcctgggatcctattaaagtgcaggttccgatccagtgggtgtgaattgaggtttacgaatgtgtattttatgaggtcaggagatcgagaccatcctggctaacatggtgaaaccccgtctctactaaaaatacaaaaaattagccgggcgtggtggcaggtgcctgtagtcccagctacttggggggctgaggcaggagaatggcgtgaacccgggaggcggagcttgcaatgagctgagatcacgccactgcactccagcctgggcgacagagcgagactccatctcaaaaaaaacaaaaacaaaaacaaaaaaatgagtgtgtattttatataagctcctgggtgatgctgctgctggctcttgggctgcactttgaggctaagagtctagatggtcctgtgaagttcactggattgttctttctttttttttttttgagacagagtcttgctctgtcaccaggctggagtgcagtgacgtgatcttggctcactgcaacctccgcctctggggttcaagccattctcctgcctcagcctcccgagtagctaggattacaggcgcccaccaccacgtccagctaatttttgtatttttggtagagacggggtttcaccatgttggccagtatggtctcgatctcctgaccttgtgatctgcccttcttggcctcccaaagtgctgggattacaggcgtgagccaccgcacccagcgattgttctttcattcatttattcattcaaacacttcaggtggggagtggtcagacgtgaggctacagggagacagagcccagggtcttccagggctacagaatttggactttatctgagaggtattggggagccagccacagcaacgttttaagcagaggagtgacaagttgaggtttgcatggaggcagctcccctgacatagcacagagaatggccagtggggtctgcaccgccactgtgagccccacatcatcctggtgggggatgacagtggtctagagggaagtggcagcagtggacatggagagagtagaaacattctttttaaaaaagattaatcaactttttaattttttgattttttacttttgagacagagtctcactctattgcccaggctggagtgcagtggtgcaatctcggctcactgcaacctccgcttcctggattcaagcaattctcctgcctcagactcccaagtagctgggattacaggtgcgcgccatgttgcctggctaattctcgtatttttagtagagacagggttttaccatattggccaggctggtctcgaactcctgacctgaggtgatccacccgtcttgacctcccaaagtgctgggattacaggcttgagccaccgtgcctggcctcaacttttattttttagaaattagctttagaaattagtgcaaagtacagagagttccaatatactttgtcctacttattgccaacctccctagtaaaaagatccttgaagttgtataagtgatgatcaggatttgaggattgaccatgggggtggtcacgaaggaaaaggagaaaatgatggccaattccctggtttgggcaactggtggtggcttcattgatacagggaccattagaggaggaatgatggacttgcggggagatcacacattcagtgtagggcttgtagagttgggggtactgatgggatatgcagaaggaggtctccatccatgtccctgggatgcagccacacagctgtcctctgtgtcagcagcatgctaaggctcttcctggcccggggctttggcctatgctgcttcctcccctagtgagccccgccctgccccttgagcagatttcggtctccagccattccacagggcggccttcccaacactcccctggactctctcacagcacccgagggttttccttcacactgcagatcttggtttctgtttatcctgtgtttatggcagtgatgacttggtcaatatccctccttcctctctagttcgtaggctccacaaggacaaggatcatgtctttcttattccttcctttatgcacagagcctagaacagtgtctggatgcagaactattccatgaggatttgttgaatacttgcctgtggcatctcaactcaggaaagcggtcagggctggcagagtggactgcgagtcatcagtggccagatggtgcagatagcgattgtggcctggggagtgggtgggttcccaagggagtggacaggactgtgatgagaggggccctgcagcaggtcctgatggacaggcagacaggcccatgagagggtggagaaggggtgaaattcagggagggagatgttaaggccacgctgtgctggagtgaccatggctatcgtttattgagtgctcatgggtgccctcatggtgctgagctctggatactcattagctcatttattcctctaacaacattgtgaggagattctagaaatcctatgttatggctaaggaaactgaggcacagaaaggttaagccaaaggtcacccagcaagtaagtgtgaagttagtatctggagctccccctaatgtaagtaccgcctccatcctcctgaattttgccaaacctgctgtgttggagacagtggaggtagaggggagaggagtatggcctggagggtctctgagctggtggcggaggaaggactgggggtgtcagcctctgggtggtcaagaggccagacctggaggagctgggctgacgctgagccaggagagctaagtgttagctgagccatcaaggttcctggaagctagcattgagtcagggacctgaggctagggatccagagcatgccaagcttgaaggaacagcccatcttgaaagcctgggggtccaaggcagggcaggaattctaacagcctctccctttctcaaaggactttacagttcacagagtgccttcctgccctttctcacttggtccccttaggtctctggcacaggaagcagcaggcatcctcacccactttcatggcagagaaaaccaagcttggagtggggtagcttgggatcacacagctagcaaatgatggagtgaagattccagtccaggtcttctggctgcatgtccagtgctctgtcagtaaaatcctggctgttaagggccaccctgagacagaggcaaaccccagtttacacccccccagtgcaggaagtggttttcgagggcagatgcagagcccggcatccgtggtggctgtgatgaatcatcggagtgagagctgcaggttgtccctgggtcagcaaacctggctgctcagtgagtagctgtgtgatgttggacaagtcactttcagcagcccaccactaccctcaacccaacatccggtgggcatctggggcccaggagccaaagctggtatgagtgtgaactctgggtgtcatagctgccatccctccttagcctattctgagctctggattggatttgggagaggatttgattaggtcctaaacagtgactccatttagagggcctggttcatttcctgtgtgcttacagcagatgagacatgggcagaattaacctggtccagccaagccaaagaagtgatggatgggaaagacacagacccccaccttgggagggtggggcagtggcttccagcactctagacccaaggccctgggtgagcaagctggtcttcctggggcgccctggctggattcttgttacttcagctgttgcaacagctgtctcactgggtccccagctgcctgtacttcctctatcagagcagtccccatgctccttcaaactagttgtctaacctctgttttttctacttaactgagggcagagattgtgtctgacttgttccctgccgtcctcctagtacctacctcagtgcttggagaatgcatgaatgtatgcgtgccccagtcctccctgccatccacacatcctgcccacattccccagagcagctttgacacagcacagctctgcctgtggcatttcgttgctcacagggcaaatcccatgcccaccatgtgttctgcaacctccccctcatctttgcctcccctcctgccctaattttctcctacacttgccaccctcccacccctgggtttctcgggtttcctataattgctccggagctcccgtcaaaccacttcccaccccagctctcccaagaacaggggccttaccaaacctgcacgcagtccctgttcatacagacctgcctgggagcacagaaagaaccatgagctctgggccctgttcgccagcatctgctgatgtgggatgcacccaggtgcggggcctcaggcagcactccaggctgttcctcctccttctacagccctctgaggtccccaaacacttgtgtgtaaggctccaaggaaacagggagagaccctgggcaggagatatgagttctaatcctgcatcagcctctcattcttaggtaattcctttaccctctgggaccccaggtttcttatctctaaaataagaccactgatagctcccattgtatcaaaagcttttccagggccaggcactgtgaggagactcaaatagtcctgtgagtccagtatgatatcactgggctcaattccagatgaggaaacggaggctctgaggtgttgagaggcttggccagagttgcacagctaaaaagtggccccattgggatcaaaatcagcctggctcgggtatctgagcacataaccactgggccctctgagaacccttccatcttggttagtttctcggctgatctctctgggtaggtgccctctgggggcagtacccctgcctgagtggcacttcccctcctggctttgtttggtttggcctcgatttagaacagggttggcagaggcaggctgacttgcatttctggttttgggtttgttgctgcactttccccaaggggtgggcgggctctgactgacagtcaccactgggacaggcctgggccccaccctcaccacccaggaaaggggaaatgcggcccgctccccactcagtgccactctgtgccactccgtgccaggccctgagggcacccggttgctgcttccttccgtctttccccaaggactatcagaggcaggtggctgggccagggggtgggtcggggggaggtctggccatgtggtagggtgataggactgaggggccccagggagctggctgcagggcagtttgtttctcctgatggagaatgctccctggtgggtggggcgatgggctggggactggtttgttcatggggacagagatcagaagtgggcttgagaagaacagggccagaaggcctggactctggccccagcctagcccctaatttgtgcagggtggctttgggcaagtcactaagtcactgtctagactgggccctcagccttcctgtctacccaatggagggtctttctgtccacctgggaacagcctgataggactgaagcacagcccttagtttccagatgagaattctggactggaggccctgacattacaattgccaacactgactctggtgtttggcaaaatttggtgtatgtgggaaacacgtgcctctggttgaggtccttaacttcagaatttccctctagatcaatgctttttaaagcactaactccaacaccaccatcttctgtaggagctttcgagctttccagcttttccagcatacgctcctgatctgttactcaggcatgctggttatcccatttcatacgtggacaccttgaggcctaaaggttggtgactggctctacctgacacctctgtgtgattctaggttgccccttgctcctctctgggcctcagcctttctgtctatgcagtggggatttcggatcgctgttgtttcagagtctgaggctatgaggtctgagagggcccttgtgtggagtcacctctgagctgcaggcaggatttccagggcaagaaggccacagcatcagcaggcacctgtctttggcctgtgagccatagcctaaggcgtgcccttcccgaccttggccagatcacgctagagtcctccaaggcctcccctcccttgcccagccaccttctctgctctgcagggctccactttcactttcacactcccaggctgtggctcttacccgtgccgagctttcacatccgctcacatctgtgctcccagatgccagcgtgacccctgacacgtgtgtgcagcagcctgcagctgccccaagccatggctgaacactgactcccagctgtggggcttcaccattacagactccccagggcttcaaagacttctcagcttcgagcatggcttttggctgtcagggcagctgtacaatagtgggtaagtcaccggcctttgggctcagttttctcatccatcaaatggacattaatgatttctacaatgagagctcttaacccatgttctgggggtacttacccctgaagttttctgccagtgtgcgcgtgtgcccgcaggtgcacacattcccaagcatctgttcagttcccgagtatgggtgaggtctttccctttcattagttctcagcagctatggcttcttgaagacagaacctgggctctaaataaatagttccagctccggcattcctggtccttgactgggaggggcccaccccagacttgagaactgcctccctgtgtggttgtggcaccatggacactcctgactttctcggggccccaatcttctggtgacatagctgctattcagactttcattaagagaaatgtttttctctttgcacatgaaatctactgtcgaaactcagcaaaaccccctaggatcccgagggttgtgtgtgaggcaggagatgctgtgttttttgaggaatccctgagcttcctccaagcagtttaaaaatccctgggtgggtgattcttcagggaggttccgtgtgtctgcgacatctggtgagtccaggtgtggacaatattttaaagttccggtttcattccagtttaatagtttcaaaaagatacttaagcgttcagagcacattcttgtttgaatgactcattaggattttttaaacttgagttcaggtagaagacaccctgggctgggttcagtgactgccctggcttggttctggtccataagcagagactgcctggttctcctttatccccagaggcaactttgaccctgtttccttttctgtaaaatggggacagtgatgcttcttttatagggttgtcgggaaggccacataagagagtggggtcaagctggcctggcacctgccaaagcaggagctagatagatagtggttatctctccctcttctcctataaatgaccagctgtgtttttgatggagcagaaagttcaagcaagaagacagggtgagaattgttacccagctaagtcaaaggggctttgggggttccatctggcacctcagctttcagactgggggcccggggttcaggccactgcctgatttcatgtcagctcatgcatggtgtctggcatcttggagcctcctcttctgaactgttcttgttttctttttgtttcccagatgtttgagacggaggcagatgagaagagggagatggccttggaggaagggaaggggcctggtgccgaggattccccacccagcaaggagccctctcctggccaggagcttcctccaggacaagaccttccacccaacaaggactccccttctgggcaggaacccgctcccagccaagaaccactgtccagcaaagactcagctacctctgaaggatcccctccaggcccagatgctccgcccagcaaggatgtgccaccatgccaggaaccccctccagcccaagacctctcaccctgccaggacctacctgctggtcaagaacccctgcctcaccaggaccctctactcaccaaagacctccctgccatccaggaatcccccacccgggaccttccaccctgtcaagatctgcctcctagccaggtctccctgccagccaaggcccttactgaggacaccatgagctccggggacctactagcagctactggggacccacctgcggcccccaggccagccttcgtgatccctgaggtccggctggatagcacctacagccagaaggcaggggcagagcagggctgctcgggagatgaggaggatgcagaagaggccgaggaggtggaggagggggaggaaggggaggaggacgaggatgaggacaccagcgatgacaactacggagagcgcagtgaggccaagcgcagcagcatgatcgagacgggccagggggctgagggtggcctctcactgcgtgtgcagaactcgctgcggcgccggacgcacagcgagggcagcctgctgcaggagccccgagggccctgctttgcctccgacaccaccttgcactgctcagacggtgagggcgccgcctccacctggggcatgccttcgcccagcaccctcaagaaagagctgggccgcaatggtggctccatgcaccacctttccctcttcttcacaggacacaggaaggtgagaaagctaaagggggagggagaaggatacatgcaatgtggggagggctggcccaggggctgcagggaatgagaagtcaccatgttccacccccactatcctggcagcctcccagcgaactttccacctgttggacagaagataaaactgaggcccaatgggaccaagaaggcagagcatggacttaaacacatgactttaggattccagatgctgtgttcttatagctccactggtccccacagaaagcagagcaggtgtagcttagcccaggccattgtgtatttggatttaaaagatctgagatagtagctggagaaatagagttacagcctagccagactagaaatccatcagccagtcacaatgacaacacacatttattccgtgtccacattatcctaagcagtttacattaactcattaactctcacaacagccctttgaagtagatagtatttttgtgcccattttacagcagaggaaaccgaggcaaagagaggttatctaacttgctccaggttacacagtgtatcagtgtctgaactagaattagaatctggttccagggccagtgctcttaaccaaccaccacaccgtttgcctctcgtgaatatttatatgtagatgaataagtatttatggatttcctgctgtgtaccaggccctgcgctctgcaacatggcaggagccacagaagtgtgtgaggctggtctcaacctgagagaaataagttaactgtgtgagccttgaaagtggcctaacagtgaacagattgcgccatgatcttgaagcctaccagctagtttgggtctgggctctgtttcttactatgtggctttggttgagtcactcaactcctctgagccatagttttcttctctgaaaagtaggggttaatagcactcacatcccagaatggttgaggatgaatggaagaggctggtgcctgataacactagccgcttgagaggcggccctcagggaatgctgggccccactccttctcttgaaatgcaacagccagtgcaaggtgttggtgtgaggctaggtgagtaggggtgctcagtgcccatggagcacaactgactcagagatctagaacttcaggaggacagaccccagggcctaaagccatcagggaaagcttctggaggaagatacctctcagcttggccttgaaggatgaacaggattagaataaacagagaggtagaggcaagcattctttggctagagcagagcattcctaaagggcagatgcctggcacaggtgctgctattcctccctccaacccatggcagacatcattaatggattccagcatacttcctcaccaagttgggacatgtcctcagaagcctgcttagcttcttagccactagcaagaaggcagacttaccttctggggagatgccttctgctgaaagctagtcattctgacagggcaggctggggccctccagaaaagggtcttgaactttggccttggaactaaatctccgtttcctcatctgtaagcgtgtgtggttctcacactgtggtgtgctccggaatcaccaaggggaggtaattaatatgtgattcctagtccccatacccagaactctggaatcagaatctctaggggtggtgcccagaccctatattttaaacatgccccgagggatcatgatcttgccaaagtttgaatatcaccatcttaggccatttcttgatggtttctacaggagagagtccggaacgctgtccttccaaggcaaggcctcaggctcattcagatcaggcctggccactcctctttggagggcggttgaggcccacctgccttgggcttcccaatcctgattcccccactacacccttcccagttctattcccctcaccacacttgctccaataaaactatttatatacagataaattcacacacattcatatgtatgcatttatctaattccccagctcagttgacctcggctcctattttgggacacatactcctgcctgggagtctagcaggcctggaccagctctctcttgtctcagcttcctcctttgggtgcccaaggttcccactggcaccctcccctgtcccaccaacttttagccggtcacttcctttcttgggtttgagtggctgagctggcagagacatcagaggctgcccccagcctggtggtggccacccttccatgtggcttccacacaccagttcctgagccctttgccattcacatcctgccctcttccaccagtagcttcagtaggaaacttgtcaagaggagatgaagccccggatgggacaaacaccgtggtctagctccatctcttactggtactgggccttgggcaagtccctgcccctctgtgagccacagtttcctccttggtgaaatgggtatggtaataatgcctccttcctagggttgctgggaaaattaaatagcttaacacaggtaaaacatttagggcagtacctggcgctcagcacctggtgggtgctgcataaatggtaatcatgttatgtggagggggagggggagaagagcagtaaccagggtagtactggctgtgccgccattcgaagtaccaccagaccccatttctcaccttcctgacactgctgcaaagtggacaggcacttggcttacagtgggaggctgaggctagtgagagatattttgtccccagccacacagcagcaagtgatgatggcactggacaaggcctcaccattgtctagtcagtcctctgtggctctgccctagactctgagacctcatgctgatgaggggccgggggtgggggactggcagagggacagtggcaggttcccccatgacttctatcttcctggctttggcctggctcttctgggagggtcccctgatgctgatgggccactattcctaggcaatgccaggcaagaggtgaagaggggaggggtgaagtgttcaggctgtggagtcagacagacccaggttcaagtctcagctctgcctcctcctccctggctctgagaccttggccaagttgcttctttctctgagcttcggttttctcttattaatggaacacggagtcccccgggagttgtcccaagggttccagggcgcagtacgtagaaagcttgggctggtcatttgtgctgctgtgcggataagctgaggctgcccagagtacatgctgcctgccacagggtgacattcagtctcgacgttgtctccggtccacacccctgttatcctgccctcttatgtgctgagcaatttctactgtgagtaggaatgtcagaacaggcagacctcagagatagtctgctcgaccatggtgatctcacagatgggctgactgagtccagagagggagagccccctgcccccactccccgccatggttctccagctggccatcccctgggtgtggcgccctgtgctgagttgagtggtctcatggtgccccctgccgccagacccctgccttcctggctgctccctggaggccctgcagagcagatcacaggccttcttcctggggagtcaaggaagccccggagaataattgtgtttgggtccaggatgctgccattgaattctagtccagcctatctggctcagcacagagggtcatgggctattctttgacagtgaggagaccacaggctgcagcccttccctggccctgcttccttcctcccctgcaggggactggcctgggcagaggtggtccacagagggtgccagccctgtttcactaagctcccacgtaggtcagagatcagacgagaggaccccaaaaatgccttccagctccaagacgataataccttcaagcctcctatttttaaaaagcctaaagaattatttcggatgtgtaaacaagtaagtatagagtttaaatccactgtttccacgtggttccatggggcctgccagcctgggctggatcggagagggcagccatggatggccagggagccccagaagtccgaccaggaccaatagggaaaccagctgagccctgctcacagacgagcgctcagtcactagtgggctctggacccagaccacagttctctgctacttgttagttcagagagcccaggccagttatcaaactgccctgggcatctgtttcctcagctgcacactgaggggaaatatcagtaactagctcttagaatcgttgccaagattaaatgagataaagtatgttaaaacactttggcccggcacctgacatgtagtgaacgctcaataaataatggcaaaacccatgctagctgagagtacttgctcactgctgtgtgttgggcgctgtgctgagcacgtccccgtgttaacttacataatcctcaccacagccctttgagggaagtccggttattacccgcattttacaaataaggaaactgaggcacagagagggatgtaactgagctaaggtcaatgagctaataaatgattgagctaagcttcaaatccaggcaattaaaaatctacactcttaatcattactataattacagttataattacagtaagaattataattattgttccaagaggtggtgagctcctagtccctggaggtggctggatgaggctgggcagggcccagggattctgcctggagtgaaggaagggctgtatggtcctggactcacctccatctgcttttcagctggacaaggtcacatagtgagacagtggggagaagatggaaaggagaatccctttggagggcctttgcagactaggccctgggcaggcattgatgcagctgtgggaggggagggaagagtctgaggagccactctggccccctccaaggtcagaggccaaagcctccctgcagctatggtgagtccctagggctgggaatcagaacccgattttttcacctcaatttctccttggctcacaggctctttttggtgctggggtttccccagcagcccagggggctgactcctagggccagagctgcccagcccctctgtcaggctgctaggcttgggtcagtccctgctgaagacactctcctccccacagtggaaggaagagcccatttcccagcagcgcagaggctgaggatggcggctgggtgggagtggtccccaggcccattgtgtggagccgataaagtacggaagctgaggttagaatgggaggaagcccagggcccgagggctctttcccacgggtgggggccttgggcatggccttgccaggccagcatgagtgcagcctgtatgtgcactgaagggtgccctgaatggtgacagtggtaacactcactgggcaatgaccactggttactgaggttagcgtgggtgccaggactgggccttggggtccagagtttatcctggtgaaccttccatcagccctgtgaagtggctgtcactatgcctaagccatagctaaaaaaatggaagccgagaggctaggaaacttacccaaagttggtgaaagcaggatttatatccaggtctggttccaaacacttgctctgaaatcacacaccatacggtgtgtgcctctgtgtgcacgtacacacatgtatgtttacaactctggtggggcagcattctcaggaaggaggcagcacttcccgagtctttcacaggaaacattaaaatgtgttctgaccttgcatttttgagtagcagcatcctctggtggagaaacacaggccttgaattgaggcagattccagctctgtcacttacatgctgggtctccttggggaagtgacttaaattctctgagcctctatttactttataggtttattgtgaggtttaatgagatagtatctgaattatgccccatccagggtctggcctatagtatgagctaaatgaaggtgtaattcatccatccatccactcatccactccttcatccatccacccacccacccacccatccatctattcacccatgcattcatctaccatccacccacccacccacccatccatctattcacccatgcattcatatatccatccactcatccatccatccacccatccatccatctatccacccacccacccatatattcatccatccatccatccatccactcatctatccatccacctatccacatatccatccatccatccatccatccatccatccatccatccatccatgcaggtgggagactcacaaaagcatcccccgaggaaggaattgcacatggagatgaagaccttctgttggttggaaggcagagttgaggaggttgctgaagtaggggccaggctggagagataactgaaggaataactgaatggaactttctgccctgatcctaagatggtagatccagtcgtgttacggagtttgaatgttatcccgagggcactagggagccatggaaagctataaggcaagagaggtgcactcaggcctgtgtaatgatttattttatacactgctgaccatctcaggtctcctttgaacttcagaatcctgacttaatcattatgatcctgattttagaaattaaggaatagaggcttagagaggggcagggattggcctagtgacacagcagaagccctgccctctcacctgctcactgcctgcaatgaagcctctgtcctgagtgccagccgtctggcttctccccagtgagctggggacctgactgtcccaggaggagatccctgtggccggagagtctgccaggccgattccacttcatggccaggctgttcccagcagtggggtttccctccctcacctgtgtgccgcgggtgggggctttggggatggaaggggctggtggcagggaatgttgggtctctgagcctctgtttacttaggcaggagttcctgggtgcccagactgcatcgtgtctgtcttctctccgcagatgagcggggctgacaccgttggggatgatgacgaagcctcccggaagagaaagagcaaaaacctgtacgttgggaagatccctggcttctgcgctcctcttcctcccttgccccagggcttgtctctcctctaggggtccaggtggggagaagaggttgtgcctggtcccgcccacaaccccagacagacaccaaggaaaaactggatcttggaactttgcagtgaccccaaagtggggtcacctgggtcctgagcattctctccaagtgaggcaaagtgctgattcagtacccggaagccacagtgaaccagaagcaaccagcccgtttgccctggctttagcccagcttctgagccaagcagggaccaagtgacttcaacaactcctttgctccctctgggcccaagagtgacctgagaaggggtggaactgacagtcattggctcctctttctcttcctgagctcctgaatgctaatagtctcaggcattgccaggagggggcgctgctggcccagctgccgaatcccgcactcgccaagcctttctggccacactcaggccttcttatactatagggtgtttgttagaggtgtcaatgaaaaagatgtgtgtgtgggttctcaggtcttcttctacccccaggcctaagaccctggagactcgggggaggtatagggaggaggcagtggggtgcatgcacagtgacacctccagaggaagcccctccccaccaggtcctgtagcacccaccactaggcaggaattgggctatagggaggagcctcctgcaaccctcttctctggccttgaccgtgggtggggtccactaccctagaaagccttcctcaccccagctgccttgacctctccagctttctgcagcaactgttggcttctcttactccacagccaattgcattttcttagcaaggtgaaatgcataaaccaaaacagtcccttgcaccaaccatcttcacttaaccttttgtaggatgagagaggatccagggggtgccaggactgttgaatgtggtgctggaagtgggaggtgtagggaagcagtgtgtggcgcagagggcaggcatcccgggtgctggagcagccctgtctagcctcctttcaatgtaggtgctgccttttgaattgcctgaagcccacactttttttttttggagacagagtctccttctgtcacccaggctggagtgcgatcttggcttgctgcaacctccgcctcccaagttcaagcagttcttgtccctcagcctcccaagtagctgcgattacaggtgtgtgccatcacacccagcaaattttttttgtacttttagtagagatgggggttttgccatgttggccaggctgttctcaaactcctggcctcaagtgatcttcccgcctcggcctcccaaagtgctgggattacagacatgagccaccatgcctggcctctgaaggtcatactcttaaaagcttagacgaagagtcttagaacatctacggtaataataagaataaccattaatgtttattatgccccgcactgttctgtgtgtatttcatatgtaatctaatttaatctttaccactacttttattttccgttctgttctttcttattgaccttacccttattttacacgtgaataaactactgtgcaaagaggctaagttacatggcaagaaagtggtggggttgggacctggagacctggcctgctggcttctgtttgaggaaacagcttgacagagaaaaaaccttgataggaaacttgagagatcaggaaacgtgtcaaagggcacacagctggtaactgctggagctgggatttgaacccaagactagctccagagcctgggatcagcctcccctgcaggactctccttcattagacagggtgtctaggtcttagtgccattttaagcttgaatagcatcagaagtataaatgcttcaaacttaccaaacccccttgaaagtttaattattaaatttcttttgcacgtctttagttatgtgatttttgaataatcaatttttcattttcatttttggtttgagtcagcattttccatctttgggaggatggagaccaaaacttaaagtgaaacatttattattcgaaaatcacaaaaccatgcacacaacattaaataattaaactttaaaatggtgtttttgtaagtttataggacttgtacttctgaagttattcaggcttaaaactactaagatgttggggtcctgctgtatattcatgactggatgtcgccaatgcaggtgactgaggctgagaggccggctggcaggagccattctctgggaggtgccctgtacagggggtctagggaaaagaggggcgaacatgagcaagaggcatttaactcctttcttgccagcagtttcacccagtgctgaattctgctgcctccttggggaccggcaaggctaaaaatggttcttggctaaaaatagccagtcctgccaccccggtggtgggcagtgcctcccctggctccctccttccctttcagcaatttgctgacttgtcccccaccccccaccactgtctccctgctgccatggtaacgaggaggccagtcacaaatagctgggactggcttcctgccggggcggccccagaggctgtcccttgcagacacatgcccctttcacggctccctctcagggttggccagaaggaatttttttttccgctccccctcctggtccctcccatttcctggctcctcctgtctgagtcccagccccggcttgtgcctgggagtccagtcatcaggccaggattccagagagcgtgtgtggctgcagcctgcaccgttgctgcccgctgcccaggacgcggggtgggggacaggagccagagtggtgcctcctacagaccaatctgcggccccaaggtggggggccctacagagatgctccgaggcatgtacctcactcgcaacgggaacctgcagaggcgacacacgatgaaggagtaggtgccctcgacccagctctcccgactctggatttgcaggggcgagtgggccaggctgagcaaccctcttttctgcttctgtccccagagccaaggacatgaagaacaagctggggatcttcagacggcggaatgagtcccctggagcccctcccgcgggcaaggcagacaaaatgatgaagtcattcaagtaggtcctccctggcaccctgggaccctttggggaactcactggctccccggggagtaggactgagtggtagggttgaggggaaggggcttgccggcttgatccagctctgggggagacaggctttcacagagggagctgggtacctggcaagcagctaccctcacagggagcagctgccctagggggaaggctaggtggggtggagatgggggctggaagggaccctggccccgggaaagagggtgggcctccttcctgggcgccccagctgggctcagctgcagactgggcccagggcagtaaacaaaggccgcctggcccagcttcccccaaggttcccaagcctctcagtgccctcactgtgtttcctccctcacccctcaggcccacctcagaggaagccctcaagtggggcgagtccttggagaagctgctggttcacaaatgtaagttgggcctgcctgcccactccctgtgccctctctccctctccccttcgcccccatccagaccctgtgtagctggtgctagagaggccgccttccctctcctcggccgtcagggtgtccttgctgttgcggaggggctgagcccaagctgaggcccttggtctggccttggagccagcttctgccagcccctccccgtccatgtgagctggcactgcctgccggaggcccgtgggacctgtgtgctcagatccatattcccagaataagaataaacatttctacgtactgagggctttcacggcgccaaatgtgcctgccatctcatgggcagggtcccatcggctcctcccagggctccgggagacagaatcgatagtccccatttcacagatgaagacactgaggcatagagagggggagaccccactgagaccctgaaagaggcagtggcagggctggggccacatcccagggctcctggctgtcggggacgggcattgtactcagctcccagcacgcccatctttaaagtcctgtaggggtaagctgaggcatcttaagggcaggagaggctgagtttgcctcttaccccaggatccgttctcctcacagacgggttagcagtgttccaagccttccttcgcactgagttcagtgaggagaatctggagttctggttggcttgtgaggacttcaagaaggtcaagtcacagtccaagatggcatccaaggccaagaagatctttgctgaatacatcgcgatccaggcatgcaaggaggtaggacctcagggcagaccctccgctcctccaatccccagggcccagtggcccttcagctgcaaggtggcagccagcagcacaggaaggggagaggccagaatgactccatgagcccaggtacccagcagggaagatgcaagctaggatcaggggaagaacagaatcccagttagtaataaaaatggccaccaccaaggcactgccgcatgccaggcatgtgctgagccctttatgtatgcgttctcatgtttaatccacacaacaacctgtgaaacgaagagacaggctgggcacagtggctcatgcctgtaatcccagcactttgggaagccgagccaggcggatcacttgaggtcaggagttcgagaccagcctggccaacagggcgaaaccccatctctactaaaattacaaaattagccaggtgtggtgatgggcgcctgtggtcccagctactcgggaggctgaggcaggataatcgcttgaacccgggaggcggaggttgcagtgagccgagatcgcaccactgcactccagcctgagtgacagagacaaatcataattgctcccatctattgagtgcctactgtgtgccaggcactatgcgcaaagcacattatatggatgatcttgcttggttttcacgctttgaggaatgtactattattcctagctggtagataagacaactgaagctcaccgcacttaagtaatttgcttcaagtcacacacccaggtgtggcactgctaggatttgaacccaggaagcctaaccctcagggtggtattttcagccttataaatgctgccagccctacaggaaatgactgagccaggacttgaatcctctggtctgagggtctctacttcagatgaaccttaagatgtggggcaaaggggcttggaggtgagaggctggatgggtcccttccaggcacatgggccctagggtcagtccccagcaggcagccctgaccatgtccccctctgcctccccaggtcaacctggactcctacacgcgggagcacaccaaggacaacctgcagagcgtcacgcggggctgcttcgacctggcacagaagcgcatcttcgggctcatggaaaaggactcgtaccctcgctttctccgttctgacctctacctggaccttattaaccagaagaagatgagtcccccgctttaggggccactggagtcgagctcagcgttcacaccaggcgggctgggtcccctgcccacctgcctccctgccccctgtgacggagggggcaagcaagcccccagaggctgtgtctctggacagacggatagacatacggaagcgaggcctggaccaagagaggcccaggctactggaggagtagaaggatgggccccgtggggtccccactgccccggtacgagggggcccaagaccctggcaggtcaggggccctggccaagccagatctggagctgctgctccctgctgcggagaccgcggaggcttcgcgttgaccaagttccttaaagaactggctgatggggcaggaggtccaggcctgggctctcgggccctcctagagggccattggagcttgcagctcagacccccactttgagttttatttatttaaatagtagttggatgcttggcacgtcgtcctgtaataggaaacccttgcctcatcagttttcctgatttacaagtgcaatattttagccaatgccttgggagaagctgccatgcaaaggtggacaccattctccagcttcaggggatatgctcgtcccgggcaccggtggcaggcagctggccttctggactaaggcagcctggggggacactgcagtctggctacacacagagatctggcaccccctgggtggagtgtccctcgggggctttgggaaagcatggcaccctcagaccacacagtagccaagttctggagcaaataaaaggcctgtgttatttcttgttcttga

SEQ ID NO: 32 - DNA, 16543 bp, Homo sapiens
gaaatactcgtctctggtaaagtctgagcaggacagggtggctgactggcagatccagaggttcccttggcagtccacgccaggtaggtgcacaggactagttgggtacctgtgggtggggtggagcagtggacagctaataggttaataatgcctgtttgcttacgtgcagacaatggaaaccattttcctggggatgttgtagcctaaatatgtccaaggggatggaagagtgggaggcaaggggtgatcagatcatttataatacactcaacctggtggaatagtattagaagcattagtaattacattttagagacatggagaaaagctcatgattttaaactaactgaaaaaagcatgaaaaattgcatctggatgctgttgaggaattattgctaattttttgagatgagaaattgtattaaagtctttttcaaaaaagagtccttaacttttagagatgcacacaagtgtttatgggtgaaattaaataattcagtagagacattaagtgggaaatagaggaaatattgaccatgggttgctaatagttgaagccaggtgttgggtataaggaggttctcgctgcttttatttgaaaagttgctttttatttgaaaatttaataataaagagtttttaaatttgtatctgtattttaatataaatataaatgcacttaatataaatataaaatatgtataacatttagatagagaaaagctaaaagattactgtggttgattctaggaaactgcattgcagatagtttcatgggtttttttttcctttttcttccactttttgtaccatctatgggtttttgtttgttttttgttttttgggttttctttcttgtttgtgttttgttttttgagacggagttttgctcttgttgcctaagctggagtgcaatggcacagtctcggctcactgcaacctctgcctcctgggttcaagtgattctcctgcctcagcctcccaagtagctgggattataggcatgtaccaccgcccggctaattttgtatttttagtagaggcggggtttctccattaataaattcctggcacaaatttagtgttcaattttgatatatgttgttataaccattgtgaggatactcaggctcaggtttgtgtgggtggaaaacatggtcttcagaaagaaattatgagtgcaagacaggaggaaatccatcagaggccccagctgaggactgaccacggcttgttatttctcttgccttgcctctggcaatcacagcctcacagagcctgcaatccttgctttgtgagtttatagctcagtccagagaatggctaagaaagtttaggattctttcaacacccactccacaaaaaaaaaaaaaaaaaagaaaagaaaaaaaaattaatttttgaaatacttgaggtagaaaacttgaggcagaaaaaaattgagccaaaaaaaaaggaaaattgaaccacgtgaaagcaggcaagaaagcttgcattgctcagggcatcccaggcccagagggcgctttggagggagctgggtttcctgagaggaggcagggtgggtgacggacctgtgctggagagccttgaggaccactgtgggttgggaatgggggcagtggattggggttcaaaacccctgggaatgagaaatgggctcaggaaggctagggtggattctttcatcttcctctttgcttggctttattttcacaaaggaaggcagggcaggaaatagtctcagcccaacttcagtgtggttcttcttagtgctcaggcttacctggcacttgccacacctctgggatgggagcacctactatccatcagccacgtgccagtctccacaaagtctgctcctgaaccctgctcctcagctggccccacttcacagatggggacataggcagcttggctttggaatgaaggaatgaagtcaggaatgaagtcctggctctgcacttggtgactgtgcactgggcttgctaagtctgtttcctgcttttaaaatggagattgtccatcagcctttgaagccatgtaatgggtatgtgtcaactttctgcaaggattaaaggcatggtataggaagtcccaaacacactgcctgacccatctttgatgctcaagaaacgatatatgttgttgtcatgaggaaactgagcctcagaaagtttggatacctgaaaaacactgactactattgaatgaggttgtgaagaatccagagctgtaggggcaggaaagcaaagaacgtattagagctgacccagtcaggacgatcgtctatccccttcctcaccccaccccatcccaggaggaagcctgcccggccctaggcagctatggcacagtggcaatgtcaggtatggttctccctagccagagaccctagcctcaaaaaacctccttcttgggatccaggcatccaactgctcctccccagccccagcctctgacccagtatcctgagtccagagacgtttggaaccagcacctgtaatggaggagctgaacaaggaggggaacttctgctgctccacagcaggtcacggtcataggagggagtggaaccagaatggcagaatccagatcttggctgcctttcccaaggacttgttctgattcctagcagcacagcccaggcattccgagaagttgggctctctggcatcactcactctgcccagaagagccaggggaaagttggggcttctagctgaaccttgatcccacctgccctcttgaggggctcagaatctgctggctgcttcacaggtgggattctcacggcacgctggccacagctgatgcttcgaccccctcatcttgtttggccaaagtgcagctttttagcttgtgagtaaggaagaaaagctgtatcatatgtctttaaacatcttcctagaccacctttgttttccccttaaagtgtgcttaaggagaaaatggaaagtctcttttcagtgtgttgtattttgtttattgcaaaatacaacacactgaaagaacaatgtctgggttagcaaagtattagatttaatttcccacattactaccatccaggctgagaaagagaaccccagaagcctctctcatgtcccttcctgaccacagcctcttcctctcccacaaagaaccacaagtctgacttctatggtgatcacttccttgcttttccctatagtttgactgaatctaaatatcatccctaaacaatatagcttagctttgcctatttttgatcttcatatttggattcatactttttggtttggctcaagactaaacttttaaaatgcatccacgttgtaggagatgtacatgcacaaaaattttcacggcaacattgtccaaactagcaacaaactgaaagccacctatgtgtgcattagcagtagaaatggcaataaatcatggactagtcacacagtggaatcctacgcagcaaggagaattagcagtctacagccaaaccaacagcatgggtgagatgcttccagaaatactgagatgaatttagagataaaggcacaattggtccatatctacagggcacttaatccagtgcatctccactagacaaaatttgtatttccatgagcaagagtcatttgcactgctatctgctataacctacggtgctgtaaaattagctcaggcaataaaagggggaggtagccccaaagagtatgccagaaaggactcccagtaatcttcagtgtgtgtctatttcaaagtctttcatcatttttccttgtagttacttagtgtggaatttcagacccctctctatgtccctcttctcccttttcagccttggctttctctgcatccttccccgaagccctgcactcagcctaaactgactttcctgaacactctgggagcatgtgggctcctcccaactccaccatcttcactgccttctgttcctatttccctctgcctggccttggccccaggaaaccttcctatgctcagaccctctgtgcctttgtcttcaaagcccacccactattcactgccacctccatcttggtcaacctggaagactttccccatccttaaaacatcagctcaaacggcagatttttttttttttttttgtgatatcctcttgatcaccctcccccagtttttaaggagacagatatagaggttcaatccttgggcttcccatgacttttcttatattctgttactgagcaataataaacacttctaggaactgtatcttaaacacttttgcctctacagaatctagcacagtgcctagtattggtgaaatataattaacaaagtcttctttcaacacagagattctctccacaaaaggagtagagaaagaacagttttattatggaataagcagtaaaccaaaatatgcagagcattataggccatctactaagaggttgcaagaacagaaagaaatctcccccttttgtatagccaagtagatacaacctgttacatacatgttatcaaggcaaacaataactgttcctcaagtaagaggtcttgccagcaccgtttgccgtacatggttcactctaaatttacctggtaattagggtaaccacttgtgttagctaactggctctacccagaggaaaatcaaatttatctttaagacaaggggtaattttgcagcactgagcaaggctcttcagttaggctcataccttcccacagaaactaagagatagaagcactatctcccttaggtttgtttacatttcaaagagatgacgcccaggtccttgggaaagactagcttagctcataaagctgacaaaaagcctatctagtttcaaaaggatttacacatgttcaaagagaggagaaagtatgtaaaagttttctaggtgggcacggtggctcacacctgtattcccagcactttgagaggctgaggcgggtggatcacctgaagtcaggaatttgagatcagcctggccaacatggtgaaaccttgtctctactaaaaatacaaaaattagctgggcatggtggtgggcgcctgtaatcccagctacttgggaggctgaggcaggagaatcacttgaacccaggaggtggaggtggcagtgagccaagatggcaccattgcactccagcctgggcgatgagagtgaaactccatgtcaaaaaaaaaaaaagttttctaaagtaaatgctctgagaaaaaaacagaaggtgaggagatctctgtccttatttttaacaagaataattaaatgtttttatttttaatttctacttagactagaatatggtacagatgctcaaaaatattgacttaattaataattaaacaattaacaagtctatctctttcctaattattaaaaaaattatgaagtatttcccttcaaaatttcacagtttactttgacataaataaataaataccataaagtattttgaagaggaaagggaagggtggggcttcaaacacaaaataatggcaggttttgtaaaggggcaattcactaaacccaataggattctcctgttgctattttttttttttttttttttttggtggtggttggagggaagggttgggtgtgcatttggcctgtgtgaaaaactggtgggtagacaatgccatgctgttctagatgggctcattgctataggaatagatagtcactgaatttacttgcataggggatggggtataaaatgtttccttatagctccttaacatggaattcagcacccctctccccatcagccttagctctctctgaatcccaagggatatgtgttataaaaatagctgccatcataaatgagaaaaccatcaggacctggtaaaacttggcttcccaaacagtcaggggtctgggcatggcagccgactgagaacctttctatctagtacaaggtaaacaagatttgccaagacttgatcaactgatccagctccctatctccaaacagaacctcatctgaatgctcacaggctgtgccccagaagtgtagaagtgtcatgttccctgggcaggctgctgggcagcctctctgttgacaatagaccacacttttgctgacctaggactcatgttgctctttaagactgcttccttggccaggcatgatggctcacacctgtaatcctggcactttgagaggcccaggcaggaggatctcttgaggccagatgttcaagaccagcctggtcaacatagtaagaccccatatctaccaaaaatagctgggcatggtggtgcacacctatactcccagctacttaggagactgaggtgggaggattgctacatcccaggagttcaaggctgtagtgagctatgatcatgccactgcactccagcctgggcaacagagcgagatcctgtctcaaacaaacagtttccttctgtttgattcttgctgaaaaattgagcatgccagagctagcaaggctcttagaggtggtctggtccaatgctttaatttcatacatcaagaaactgaagcagagcagagtgacctgcccagggtctctcagccattcatgctcagaaatgtatgggctcctgtgaaacatgtggctcttaaaagcactatcatatatttgaaggcagaaaataggctaaaccttcagccttcagacttttcctctccagagaaaatgaccccagtttcctcactatggttgctgggagctagattcctggggatctggcagtgtggaccacctagtggtggctagaggagcaaataatatcccgcattccattttccactcaccaatccctgaggggcagcctgctgggttatgagcccacagggggagaaccccaacgaattcagagatgcatcatggaccagtttctcttaaggggcctgggtctactattttcagttctacttcgagagaagtggcctgcaatatcctgcagatttcccctccagggagaaaagcattgtgcggtgcaaggagcacaggctttgtggaaagaggcatctggggttgagatcctggctcttttgcttccttgaacaagttaaccaaatctctgggcctctgctggttaatttataccatggggatcatcatttctccagtggggttgtgaagagaatgtggtgggatcttgtgtgtggagcatgacacttagcaggcatccgggaatggcagcctcctccctttctaaactggggctttctgagggtgacttcagattccacaatgtcaacagcacaatggcatcctcataaggaaagtttgggttggggctcctcaagcaattctctactctcatttggtacaaagaaaaaaattaagcctcacaattttcttggcaccagactgaacctcaaacccagtcttcacttttactaaaaagccataaacagagaccaggagggtaaaaactaccagaagatacactggatttagaaaacagtaagctggatgtgaagccaaaagagagggagaaagcaacataaaagaatgtcagattgaagaagaaatggattctggccacctaaagaagaagggaagtatagaaaagggaagctgattggaaacaatgggtaatgatgagtgtccctcccctaaaaagttaaaaaataaatgagcaggcatgagaaaaggaagtaggccagaggaagtagaccaggatcagccacggatgtgagtggggaattttacaaatttctacttgggtgtgaaacatgtgtacactcaaagctctgtctaggttcaccgaaactctcccagctcaaggccatttagtaaaaccttggcttaactgaatagtgggtaaggaggcctgaggatggcccagagaaggtttaaattcttactggctgctgcactaagttgtaaagtgcagccttagttgatgatgcctttattagtgcaacatcccagaatgcatgcgtcttacaacccttgtggatatgaaacccagctgggtagacactgcaaagtcttctcatttgattcttccacttggtttctagtgtccctcagggacaaaggaaagccatggtccagtctaagatgaaaaccaattagacctctggcaggcctttgaccaccctgagggccacccccaaggcacggccacactcgcatctgctgccaggaggccctatcttaggctcagctcccaaaccttgaacatcttggaggatccacaaataggaggtacactcagctcaggctcagtcttccttaaaaagcgccttgctaaagctatcaagttcactggaatacttctgcgaaggacacagcttcagcgatgtcagattttttatgtaaatggtgccttcacatgctctggggcatttggctaccaagggcggtttgaactagctccagcacacagaatacaagtctcttcagaaccaggcaaaaccctatgttgcccaatgactcctgctgtttcttgagatttgcacagaagacagagctgcaattacccacgctgatatctatttcatgaccacatatgttcaaaagccacatgtgagaggtatggttgaaatgagaggttgtgtttgccaagttgtcttctgactgtggagagctggtgagcctcttctcatctcctggggctccatattatagagctgacgaatctcttttcttgctccttgaagtctttcattcacttatttattaattcatttaacacatcaggcacctactaacttctcagagttcaaggcttcctagcctatgatcagaaaggacacctgtgtgctcatgagcacccctgggatcagggtgactgatagggtgctgtcatcactactagatgaaactctttggaacaaaggtctaggatataatatttatccttctgcaaatattcatatggcattcgctgtgtaccaggccttctgttgaacattggcctgcagagctgaagaggacgtgggtcttctcttaggaactcctagtcttgggaaaaaggaatggggaagggctgtaatgtgaagttaaaaaaaagtgctgaggccgaacacatctgggccctcactgcagccctattgcacacacactgcatcacctcgaacaagttattcaccctctctgaattcatctatttgcccataaaaatagagatgatccttttatatgttggctaccacttattatgtgcagcatgcttgttattgtactaagttactcattttttagtttttcatataactcatatttttgttgatttttattttaaaattccaaacgaattaattaaactattttccaaaatacgtagtatgtgtacatggtaaaaaacatttccaaaagtttaccataaaaactgtctcctttcccatatcctcaatccttcagaatccctctccagggataattaccaccaccagtgtattccttaagagatatttaaactttatacaaaatacgcacacatcattcttttccacaaatgacagcatactatgtacatggtacctcacctagcttttttcacttaccagtatatcttagagattgttgcatgacagaatatacagatctgcctgtttttgttgtttttcccaagtttccaagagctagaaactgtttggtttttaagcagctgcttggtattccattaattggacttatcgtgctttgatctgtccctagtgatggacattggggttgtttcccttcatttatatttgaagcttgttgcagtgacagtgtacacacttgcttgagcatgtgtgtgtctacgataaatcccaataagcaatttaaagtaatttaattcttatgctctcaacaaacctaagaggttatttttttagaggaggaagctaaggctgttgttttgatgcctttttaccactggacttgggactcaactgtttgatagtcatcgagtccttgactcttctcccctgccaggatttggcccctaagcccagggcccgagtctcctccatcttcaagggagagtgggaacagcacaggccttggcctcagtcctgctccccctgcttctagctgtgggatgggccaggtgcttcacccagctgtgcctcctgtgaggcacagtgtgtgcaaaatggaaatgtgaacatgaagatcaaaaatgtccctcaatgaccagtgctgttcctcagagtcacgtgggaactcatagaaagcgatattggtactgctctttcctctgtagcatggtccagatggctcatagcagggaccatgatatgctgggtgagcacccactgcatgcacccactgtgccagcactgagagactcctgtgggagccacagcaattctagggtcttcactggggactctgagacagcagggagctaggatgagggctgcagagtgttcgtctgccctcactgagcagaccccctggatggcagggagcagtcccaagccagatggatgcccataaccagccatttggctctcaatacataatatcaccacgtatcaggcaaaaccatcctgcccagagcattatctgaatttgcatcccatctgcagaagatacattcacccacttcttccattctgtcttaatcaaagtctttatgtgaattttccccattgagaagacaagccccttcctggcttagactgtacctgactgatcttttcatgagctccttgccaagccagaccacccccagcttatatggagacttggtgcaaattagagatgcccctgtgcacgtggcagccctgagcccaagcacccagtaaggcaaagggcctgatttgggacccctctgccactccaccaggcaatcagttgcttatttctaactttcccttccttctccacatttgtcccattccttcctctcatcatgaatatccccagaggcattcagcagtgcagtgaattaaatatagaacttttttttttcagaattgcagaacggattagatcaatattaatccaaacagagcaatgagcctgacagtttagtaaaagctcaataaagggtggcttacctcccccaaaataatctgaaaagaaagcatgtcttatttcagggggaaaaaaaaataaagtgacctttaaagaccaaattcccaggatacccagggtggaggtggaacatgggagtccacaggcagcctggatgtttccaaagatccaaagggcttttgcttcctcacataatgcaggaaacaaattgaacatgtattaagtgcttgctgtatgtgacacactgtgccaggtgctccccttaaaacagttctgtgggcaggcatgagaatgaatcccgatcttacagacaaggaatgttaggctcagaggtttcaagctcacccatcactcagccagagaggacagatgcaggattcaatctcgggagtgcccgagtccacagaagttcctgtgctgaaggaccgaccacaggcacataaagagatgcgagacaatttttactggatttggccacctctcgaggtcggctttgccagctcttctcactgggggaaggggagggagaaagtagctagctccagggtccctaacatagaaccaccaaggacttgactatttttactcatacagcagcttgtctgggaagatcatgctctgtgacaagctgcaggcactaagtagcaatttctgtttcccacatattagcttgagtcatataaaactgacatggatgtggctcaaaaatagctgtatgtcagccattttataccatttgacttaaatgttattaattaacgtcacagccagagattattctctgagaaaagggcattgtagcctgaagcagagaaagcatacacgttccctggggttgagaactcatcacagcctgagacagcttaggttgtaaagccccggcccacttatcccaggagagtctgggtgagatgcaggccccaaagcagaggctgggaagcgagaagtgacacaccctggctgggtgggccctcatcttggtgagacaccacctgggtaaaaccatcatggaaagggtgtagtggggcgtggaaactccctcggttaaagcgtgagctttgctgtaagttgtggtaaggagggaggcagtgacaaccaggaggcctgttttgagggtttctgagggacccatctgtggtatcacgaggagacgcccagaggagccgtgtgaaagggctgcctcccagccggctctggagtgaatgagcagcaagtcctggctgcgaaaagaaggggagtgcagcctgcagaagtgtcttcttttttcaattcctgctcagaaggaaacaggagataagaatagtggggaagtccaaaccaaagtgaactatagggctggtaatcgtagggggaattagtcacccggagactagcccagcagactaacggagccccatcctccatcttgaatcagtcagcccctctatgactgcagagtcctgaatgatggcaacaccttctcttcacttagcgttgtaggatgaccaacagtcctgatttgcctgggactgaggggttcccaatagatgggactttcagggctaaaaccaggaaagtcctgggcagcccaaaacaaggtagtcactctagagtgtatgactctgtctgatacctgctaagaaagagaaggacttgttgattataaggagaagaggaggtgaaatggttctcaaaaaacaaagatgagggcttccgggtgctgttctgcccaaggctctgggtctgaggcttctctctccaggcctagcttcatggaaaagtaaggggccagagggtggaaaaggtggaaacaaaggaagaggatggagaattgctttggggaagtttggactggaagtgtgaattacagctgcacccccaattcaccccatctcacccccctccccctcctgctcatggttctccctttctcatccacacattggtcaaactagctagcttttggagagattttgggcagtaaaagtaaaacagatctgtctcaagcttcaaaaagcctagagctggctgggcgctgtggctcacgcctgtaatcctagcattttgggaggctgaggcggaaggataatctgaggtcaggagtttgagaccagcctggctaacatgatgaaaccccatctctactaaaaatacaaaaattagccaggcgtggtagtgcacgcctataatcccagctatttgggaggctgaggcaggagaatcgcttgaaccccaggggacagaggttgcagtgagctgagatcgcaccactgcactccagcctgggtgacacagcgagactccatttaaaaaaaaaaaaatgcctagagccaaatgctcacagagccatttactgcatggctttgggcaagtcaaaggagtccgcctctcctgtcagaagagtctgttgcagtcttcatcacaagactgttgtggggattaaacaagatggcaagtgggaagttgggaaatgtagtgtgcacccaaccaatatttgtttcttcctgcctgcctacatatgaggccacacagaattccaactttgtttctctgataactaacacagttacttgtttttctttctgatccaggccttcaccatggatcagttccctgaatcagtgacagaaaactttgagtacgatgatttggctgaggcctgttatattggggacatcgtggtctttgggactgtgttcctgtccatattctactccgtcatctttgccattggcctggtgggaaatttgttggtagtgtttgccctcaccaacagcaagaagcccaagagtgtcaccgacatttacctcctgaacctggccttgtctgatctgctgtttgtagccactttgcccttctggactcactatttgataaatgaaaagggcctccacaatgccatgtgcaaattcactaccgccttcttcttcatcggcttttttggaagcatattcttcatcaccgtcatcagcattgataggtacctggccatcgtcctggccgccaactccatgaacaaccggaccgtgcagcatggcgtcaccatcagcctaggcgtctgggcagcagccattttggtggcagcaccccagttcatgttcacaaagcagaaagaaaatgaatgccttggtgactaccccgaggtcctccaggaaatctggcccgtgctccgcaatgtggaaacaaattttcttggcttcctactccccctgctcattatgagttattgctacttcagaatcatccagacgctgttttcctgcaagaaccacaagaaagccaaagccattaaactgatccttctggtggtcatcgtgtttttcctcttctggacaccctacaacgttatgattttcctggagacgcttaagctctatgacttctttcccagttgtgacatgaggaaggatctgaggctggccctcagtgtgactgagacggttgcatttagccattgttgcctgaatcctctcatctatgcatttgctggggagaagttcagaagatacctttaccacctgtatgggaaatgcctggctgtcctgtgtgggcgctcagtccacgttgatttctcctcatctgaatcacaaaggagcaggcatggaagtgttctgagcagcaattttacttaccacacgagtgatggagatgcattgctccttctctgaagggaatcccaaagccttgtgtctacagagaacctggagttcctgaacctgatgctgactagtgaggaaagatttttgttgttatttcttacaggcacaaaatgatggacccaatgcacacaaaacaaccctagagtgttgttgagaattgtgctcaaaatttgaagaatgaacaaattgaactctttgaatgacaaagagtagacatttctcttactgcaaatgtcatcagaactttttggtttgcagatgacaaaaattcaactcagactagtttagttaaatgagggtggtgaatattgttcatattgtggcacaagcaaaagggtgtctgagccctcaaagtgaggggaaaccagggcctgagccaagctagaattccctctctctgactctcaaatcttttagtcattatagatcccccagactttacatgacacagctttatcaccagagagggactgacacccatgtttctctggccccaagggcaaaattcccagggaagtgctctgataggccaagtttgtatcaggtgcccatccctggaaggtgctgttatccatggggaagggatatataagatggaagcttccagtccaatctcatggagaagcagaaatacatatttccaagaagttggatgggtgggtactattctgattacacaaaacaaatgccacacatcacccttaccatgtgcctgatccagcctctcccctgattacaccagcctcgtcttcattaagccctcttccatcatgtccccaaacctgcaagggctccccactgcctactgcatcgagtcaaaactcaaatgcttggcttctcatacgtccaccatggggtcctaccaatagattccccattgcctcctccttcccaaaggactccacccatcctatcagcctgtctcttccatatgacctcatgcatctccacctgctcccaggccagtaagggaaatagaaaaaccctgcccccaaataagaagggatggattccaaccccaactccagtagcttgggacaaatcaagcttcagtttcctggtctgtagaagagggataaggtacctttcacatagagatcatcctttccagcatgaggaactagccaccaactcttgcaggtctcaacccttttgtctgcctcttagacttctgctttccacacctggcactgctgtgctgtgcccaagttgtggtgctgacaaagcttggaagagcctgcaggtgctgctgcgtggcatagcccagacacagaagaggctggttcttacgatggcacccagtgagcactcccaagtctacagagtgatagccttccgtaacccaactctcctggactgccttgaatatcccctcccagtcaccttgtggcaagcccctgcccatctgggaaaataccccatcattcatgctactgccaacctggggagccagggctatgggagcagcttttttttcccccctagaaacgtttggaacaatctaaaagtttaaagctcgaaaacaattgtaataatgctaaagaaaaagtcatccaatctaaccacatcaatattgtcattcctgtattcacccgtccagaccttgttcacactctcacatgtttagagttgcaatcgtaatgtacagatggttttataatctgatttgttttcctcttaacgttagaccacaaatagtgctcgctttctatgtagtttggtaattatcattttagaagactctaccagactgtgtattcattgaagtcagatgtggtaactgttaaattgctgtgtatctgatagctctttggcagtctatatgtttgtataatgaatgagagaataagtcatgttccttcaagatcatgtaccccaatttacttgccattactcaattgataaacatttaacttgtttccaatgtttagcaaatacatattttatagaacttcca

SEQ ID NO: 33 - DNA, 9012 bp, Homo sapiens
cgcccgagccgcgcgcggagctgccgggggctccttagcacccgggcgccggggccctcgcccttccgcagccttcactccagccctctgctcccgcacgccatgaagtcgccgttctaccgctgccagaacaccacctctgtggaaaaaggcaactcggcggtgatgggcggggtgctcttcagcaccggcctcctgggcaacctgctggccctggggctgctggcgcgctcggggctggggtggtgctcgcggcgtccactgcgcccgctgccctcggtcttctacatgctggtgtgtggcctgacggtcaccgacttgctgggcaagtgcctcctaagcccggtggtgctggctgcctacgctcagaaccggagtctgcgggtgcttgcgcccgcattggacaactcgttgtgccaagccttcgccttcttcatgtccttctttgggctctcctcgacactgcaactcctggccatggcactggagtgctggctctccctagggcaccctttcttctaccgacggcacatcaccctgcgcctgggcgcactggtggccccggtggtgagcgccttctccctggctttctgcgcgctacctttcatgggcttcgggaagttcgtgcagtactgccccggcacctggtgctttatccagatggtccacgaggagggctcgctgtcggtgctggggtactctgtgctctactccagcctcatggcgctgctggtcctcgccaccgtgctgtgcaacctcggcgccatgcgcaacctctatgcgatgcaccggcggctgcagcggcacccgcgctcctgcaccagggactgtgccgagccgcgcgcggacgggagggaagcgtcccctcagcccctggaggagctggatcacctcctgctgctggcgctgatgaccgtgctcttcactatgtgttctctgcccgtaattgtgagtccccgggccccgaggcagcagggcactgagactgtccggccgcggatgcggggcgggaagggtggagcggatcgggatggacgcggcgccaggcgagctgcgccctgggccaggaaggtttgctgctgagttccccaaattggattccttccacagccccgagatataactcagtttgcggagcgaaatgagggaaagttagagaaaggaagggaaaggctgagcccggcggtgtctccctagcccagcaaaaccctctccatgtggcagaactccctcctctctgcttccttctggggagatctcgaggtcatttttgcgccttaggaggagcagaacttagtttctccttggcaacaggagtcttctacttcccgacggctgggtgatgttttattttgttagacctgctcatgacttcagtggtatcagaaatgggcgaatggcgtctgggacgatcttctccccggtgttggcatagaaagggaaaaagaggtttaagccagccagagtgatttgcagatgcatagttttaattttgaaaaacgcgtgcgtaaactttgagacgccacggctgctgtttctggtgctgcatccgccagggattgtggcgatggaggccgaggctctttgtatgttttagctgctggtgtcgttttgacaacctgacttgacgggttttgagtgtatcttggcaagtgaggtgacatgaaagccattatctccggtttcaatttggtaatgaggatagcgatggaaatgaaattatctcctcattttgaaggcatttgttcctggagtccccgccaagacacctgggagtaggtgaggcttgaggaaacattttcagtgctgctcctctcctttctcccaaggtacctgttcaacaaaaacaatacttacagaaattccattgccaatcccacgttctcgaaatcctgagacttctgtgaataggaaagttgttaaatttcttctcagaatgtagccattttggatattactttcaatggtgaatgaaagggaaatacaaagcgattttcctttaaatgaaggccttactgcttgcggaaaaagaagtctggggcatcagcatgcaggggtgggaacagtatgcccccaaaataaataaacaaatacataaatctatatctatctaaatgtagatataggcgcagatgacatatagcagtggtcttcagaatcaccagctcagaatcaccagcaaggcttctagaaaaaaagatggctggaccccattccccagagtttctaattcagacatttttaaagaattttcattcttaacaagttcccaggtgatatgcaagctcagattcagggttcacatttgtagaatcacactctaaaacaggagttagcaaaccacagctcacaggccaaatctttcctggccactgttttacatctccctggagttaagaataattcttacaaatgaatctctgcaatcaatttgatgagacccaagagttttgagcttcaattgagccaaatactatttcaagaaaaatactgttccaagaaaacgttttattcttctccttagtagatacatattacaaaaaaattgtactcagccgggagcggtgactcacgcctgtaatcacagcactttgggaggccgaggcgggcagatcatgaggtcaagagatcgagaccatcctggccaacatggtgaaaccccgtctctaaaaatacaaaaattacctgggcgtggtggcatgcacttgtagtcccagcttctcaggaggctgaggcaggagaatcgcttgaacctgggaggcagaggttgcagtgagccaagactgtgtcactgcactccagcctgggcgacagagcaagactccatctaaaaaaaaaattgtactcaattattaatacattttgaattccatcaaaaaattgtggaaatgtgttttctcccatgttatattagtacctatcaaatatttatgattttgtctcttggccataaaacctaaaatagttactatctggtcctttatacaatctttaggagctcctattgtaaagttggggcctcacttatctatgctgtgacaaagtagacagtagccaaatgcatggaaattttgacctgagtttgaatgttttagtcagaccaatgcagaaagcagcatcatacagtggaaagaacattgcatttggacatgtctctacggagacttggataactcctagggtattgtgaggattgaagaaaatcaatggagttgaaaaagattttccaaaaaaactagcaagttccaaatatatttaatgttgacagcattcttcacaagaaccactattttctagagaggataagggctttagcatcagacatggttttgaatcaggcttcatcacttactagctatggtagcagctaatttaccctttctgacctcagtttcctcatctgtaaaatgattataaccatacttgttttgtaagatagtaatgaagatttgaaattacatacataatatatacattcatcacctagcccagtgtcttgcctcaatatattagcatcattattattactatttataacttccatgtattattgttgcctgctggacataaaaaaaaatcaagaacgattatcgtcccaggagatagtgctatatactaaggcagtggctctgaaacttttttttggtctaaggacccctttatactcttaaaattattaatgacccagatggcttttatgtggattaaatcatcagtatttctcatattagaaaataaaactaagaaattctaaacatatgattgcaaaacaagataaaatgtacctcttgtgttttccatatgtacaaggaaaatgtggggatttcacaatgatttgatgacaataaggttacagagattatagcaagtaaagtggaaaaatcctgttaagagcacaaaagtactgaaaacagtctctgaaaattcacgtgtgtaccctcaacctgccaccttaaaaggtctagaaaacacaaggataaacaaccacatattctattctttgtgaaagtgatgtcatcatttgttatctagcctccataaaattcactgtacacttgtgagagaatgaaggggaaaaaggcaaatcacatgtttgtaatgacagtagttttgacctactggacacattgaataggtattggagattttacactcttctaagtaatggacctagcaattgtatctttatctgaagggggagacatgggtgacaataagctatatggttaagttgacttaaaaagaaaacattttacatgagttttttttctatttgcccctttctcctcaaagtggagtgtggcaaaatatagttccaactatttgagaatgcttgattagttgggatctagacaactgaatgatactagcataattaaaacaaattattttattttctaggcagcatttatccatgtcaaatccattaggttgacattcaagtcactggatttgtattagaaatgtattgttcattggggctggtggctcacacttgtaatcgtagcattttgggaggccaaatcaggaggactgtttgagcccaggtgtttgagaccagcctgggcaacacagtgagaccctgcctctacaaaaaaaataaaaataactagccaggcgtggtgacacatgcctgtagtcccagctacttggctgaggtgggaggattgcttgggcccagaaggtcaaggctgcattgagccttgattgtgccactgcaccccagcctgggtgacagagtgagactctgtcttaaaaaaaaaaaaaaaatacatgggcatttttaaaagtgctcaatatccagaaagaattggtgtgagaagaacgccctctgatggagttgggagtcattgaaataatgttgttgccacctcctggacatccctgccaggcagccctctctggcttctgatgccctcttctatccagtccacgcactgtaacacaacagaccttgccctctgctctatccctttaaatctacctcagaccctttccctgggcccatcacttgcctgttgtcccttacgggcctccaacagcctcctttgaaaggagcatcgcacctattctttctgctcctcaaaatggcatacacaggagagctctctcatctctgatttcatggattctgacaagtgattaaatagcttgtacttatctttacctggcttacagaccctctctctcgtaacgcctagtatatacacgcacaccctctctcatccatccctgctcccccaccaacctccaggacattgtggttttctaaggtaaaaatgatttgggtgaaaatatgtttttttgtttgttttttgagacagtgtttcactcttgtcacccaggctggagtacaatggcacaatctaggcgcactacaacctcggcctcccaggttcaagcaattctcctgcctcagcctcccgagtagctgggattacaggcgcccaccaccatgcccggctgatttttgtatttttagtagagacggtgtttcaccatgttggccaggctggtctcgaactcctgacctcaaatgatccacccacctcagcctcccagagtgctgggattacaggcgtgagccaccgtgcccggcctgaaaatatgttatatgccttagagaatgcctctgaagctcatgccatattctctacacttgcactttcttccgattgtatcaaactggaaatttgaaaattcaatctagttaagtgttcagcattaaagtgaattttaaaaatcatactccaacaaacttttcatcaagattaatcaaatacaatatttatgttatggagaagttgttaagattccctccgcccccgcccgacttcagatgggcgagggcatccagattaaacagctgagtccagtgtaaggtgtcttcctaaatgcactagattggagtggctgagcctgctgaaatgctctacagagaagaaagtagaacagtaaggaaatgattatgggaaaaatgcatcttctccaggagatgctctctgattgcctcgaatgggtccagtctcttatccatatcccttcttactaatgttgagtttgcacgcttcctgttccattagagtccatttatcctaaaatgtatttagaattgtaggcatagagaatgtaatggaaaaaagaaaaaagtggccagccttaggcagagtggaaagcaatggttgtgctgatctagagatcagtgttggctgaatgggaggaaaagctgttgtttgaggcactttgcagggctccaaggaggctacagagacctcagggaagatcaagacaagaggagttggttggacctaggtaaggcagccttatatttttgtgcatgtttttgccttctagattgaacaagaaaaaaaaaaaggatgtcaaccatgaaaaagtaacaatttgtgctaaaaataagtatagcaatttacatgagttgaacagtatttttttccaagtcatctcaggtcttttcattgtcatatttccaatctcttcacattgattaaaagcttccattctattggtgtctccatacatatgacatttcacaggtgtgacttatttctgagagaactaataggagaagataggaagcagggagaagaaagaaaggagaactgaagaaagtaagtgcaaggacactagctagaaagagattctgtatttatgaaagcatgctgaccctgtttctaaaagattcagcagatcttcatggcctggcagggacctagaaacttgagcccagcaggtagaatagccttcagggacttaatcagactgggtctccgacaagtactcagcttccttcccacctcccaggtctggccacaccccaccttcccagctccccacttgcacccatcagctgctgtggccttagctacttgtaaatgtaccaaaaatgggtgttccaagctaagctgtcatgttcttacagtaacttaggtgaagtaagtgaatccattgctgccattaacctttccacatcataatggaatgtttttcttcaaaacagtatcgcgcttactatggagcatttaaggatgtcaaggagaaaaacaggacctctgaagaagcagaagacctccgagccttgcgatttctatctgtgatttcaattgtggacccttggatttttatcattttcagatctccagtatttcggatattttttcacaagattttcattagacctcttaggtacaggagccggtgcagcaattccactaacatggaatccagtctgtgacagtgtttttcactctgtggtaagctgaggaatatgtcacattttcagtcaaagaaccatgattaaaaaaaaaaagacaacttacaatttaaatccttaaaagttacctcccataacaaaagcatgtatatgtattttcaaaagtatttgatatcttaacaatgtgttaccattctatagtcatgaaccccttcagtgcattttcatttttttattaacagcaactaaaattttatatattgtaaccagtgttaaaagtcttaaaaaacaatggtattaattgtccctacatttgtgcttggtggccctattttttttttttagagaggccttgagacatacaggtcttttaaaatacagtagaaacaccactgtttacgattatacgatggacattcataaaaagcataatttcttaccctattcattttttggtgaaacctgattcattgattttatatcattgccgatgtttagttcatttctttgccaattgatctaagcatagcctgaattatgatgttcctcagagaagtgaggtgggaaatatgaccaggtcaggcagttggaggggcttccccagccaccatcggggagtacttgctgcctcaggtggagacctgaagctgtaactagatgcagagcaagatatgactatagcccacaacccaaagaagcaaaaattcgtttttatcttttgaaatccagtttcttttgtattgagtcaagggtgtcagtaggaatcaaaagttgggggtgggttgcaaaatgttctttcagtttttagaacctccattttataaaagaattatcctatcaatggattctttagtggaaggatttatgcttctttgaaaaccagtgtgtgactcactgtagagccatgtttactgtttgactgtgtggcacaggggggcatttggcacagcaaaaagcccacccaggacttagcctcagttgacgatagtaacaatggccttaacatctaccttaacagctacctattacagccgtattctgctgtccgtggagacggtaagatcttaggttccaagattttacttcaaattacaccttcaaaactggagcagcatatagccgaaaaggagcacaactgagcactttaatagtaatttaaaagttttcaagggtcagcaatatgatgactgaaagggaaaagtggaggaaacgcagctgcaactgaagcggagactctaaacccagcttgcaggtaagagctttcacctttggtaaaagaacagctggggaggttcaaggggtttcagcatctctggagttcctttgtatctgacaatctcaggactccaaggtgcaaagcctgctgcatttgcgtgatctcaagacctccagccagaagtcccttccaaatataagagtactcatgtttatttatttccaactgagcagcaacctcctttgtttcacttatgttttttccagtatctgagataatataaagctgggtaattttttatgtaattttttggtatagcaaaactgtgaaaaagccaaattaggcatacaaggagtatgatttaacagtatgacatgatgaaaaaaatacagttgtttttgaaatttaacttttgtttgtaccttcaatgtgtaagtacatgcatgttttattgtcagaggaagaacatgttttttgtattctttttttggagaggtgtgttaggataattgtccagttaatttgaaaaggccccagatgaatcaataaatataattttatagta

SEQ ID NO: 34 - DNA, 37873 bp, Homo sapiens
gaccagcctacagccgcctgcatctgtatccagcgccaggtcccgccagtcccagctgcgcgcgccccccagtcccgcacccgttcggcccaggctaagttagccctcaccatgccggtcaaaggaggcaccaagtgcatcaaatacctgctgttcggatttaacttcatcttctgggtgagtgagcgcgactgccgcgcgctcctctcagggcccacctgttcgcgggccccggacactggccgcggccgcgagtgccggcagctggcactgcccgcaccgggcaggcaccgggcgggaagagagagcgccctgcggctgccagctggctccaaggccgggtccagagccgggcgggacggccgcgacgggcgcattcgggtgggggctcatcaccgcccagccggcgtggggagccgggccctcttgagatgaggcgtgcgggagggtcctgagcactttagctcgcctaggatttgagctggggtgtgtgtctgctcccagctcaagtccctccgagtgccagagaggaaggcagggagaagcggagcacccctctttgggccaaggccaaggaggactgtggtgagcagtatggcttgtgaccgggtggggtctcccaggtagtagggggcgccaggaagggagggtgcgggcacggcgagagctcagccaagagcggctctcacttttacgcaggagcggcaggggtgcctcggccgcgggtccggccccgggacccagtccctgagagtcgggggcccctccacccttgaggaggaacctcgcaggcccccgttccctcagactttgattctgagccaccgtgagagcgccgaactccctggtagctccctgaaagactagcttgtcttgatttctttcaaggacgataagtatcttcactggagagaactcagagttcgggagaggagggggcagatacctatctgcgcctctagtgggatgagtcctgtgtgtgcatttccgggagagatcaggtgccagccagctgcccgcccaggagagccttggccttgccctctcccctccccgccagcccaggcggcccacccaaggccaggcagggcgcagagcggacgttcatctggagaggccagcggggccaggagctccagagacacctgctgcaggccactcagcctctacaaatgggaaggctgagaggcgacagaagcaaggaataggaaacccttgtgtccttgtttctatagccacattccctgcacacacatgacaatacttgccgctctgcaggcaggaagagagtctctatgccactctcaagatagatggatgtagaaacaggtgcatgccaccagagtcttgtaacaaaaaagtgcacttggccaggcacagtggctcatgcctgtaatcccagcactttgggaggctgaggcaggaggatcgctttcatccaggttcaagaccagcctgggtaacatagtgagacccccatctccacaaaaaaataaaaaattagctgggcgtgttggcatgcacctgtgatcgcagctactcaggaggctgagatgagaggatggcatgagcctgggaggtcaaggctgcggtgagtcatgattgcaccactgcacttagcctgggtgacctagtgagccctgtctcaaaaaaagtagaaaagaaacaaatgcacttattccccctggagctggtcactgaggtccccacaagcctccttagggaaatcttctaagattcactcctccccagagctgaaggggtggttgaacagtttttccaatttgcagagactgacttcccccagtgcatcagtcaccataacacacaccccagtgaggacggcatataggtgtgctccttcccaacccttgacttgctttaaaaagaccctgctggccgtgggcacccctcctcctgtgttgccacccaccccagcaaccacccagctgccacgcttagcttctttctttcaccaatccctggcagcagaaaagtatgcgggaaggcagctggcctcacccacccttgaactttgggagttttcctctcccctcccaggtacagtctctcccggctggtgtgttggttagtcctcagctgtctgcctagactgcatccaggtttgggactgcagggaaacacagactgccacagtgtgcctccctacccccatctgccccatggcatatgcaggaagctgatgcgaggctcacagggccactggtatctactctgtctgtggcctgctggcctgcaatctgtccgtactgtcctcagcctgccaccccactcgtattcagaaccccctatgcctggccccagcctaggtgcagctgatgacctatgtagtctgaaacagaaatcactcacactggaaatgtttggaatgacttttgaagatcatgcagtccagctctcttattcatagtgaggcagcagaggaagagagatggggtgatttacccaggatcgcagagacagagccagtattacaattcctggggcccctactttacttctgtcctcttccatcttcatcagaggcaggaagatgggcagtagctatgttttcctgaattactgttcatttgtcctgtatctgggtccctgtggagatgaagccctcatccctaggagatgatgtaatgaaaaggaagactgtggtcggtccacttgtgcagagtgttagtctttagagcctttcttgttctagtcccatgatgtagccaagagcaggaagcattgtccccactgtactgatgatcaggaaaccatttcccagagaggttaggtgacttatccaaggtgatgcggcagggtggtctcagaactaggttactttacccaactggttttggctgctgagtgggaatgggagaagggtgggaagaagctcccaagactcccttaaggaaaggtgtaacctaagggaactgcttgggtgattatgttgtcaccacgtccgtttctctcttgagaccagacatttataaacttggcattcggaacctgatgtgggccttgaaaagcaggaattgtgaggccagtgcccagcagcactttgcacagaggctgctgagagggggtgtccaacaggcatccagagagaggccaacctcagtggagtaggatggttattggggggctgtgcctcttccctggcctgatctcatccctgtgggtcactccctgatggccacagccaaaccagcaaatcagtctgttcttccaccacctccagaaccggccctcctagctctattttgattgtttctacatttccttcagacctccctgcccgcctgcccaccccccaaaaaacagttgagagggaaaacatcttgctgatgtccatgtggtagacacacaagtatttctccagctgaaatggggaaccagggttagggccagtccagtctgacacatgcatgtctgccctctttctggtcagagaaggggaggaactccttagggcaaaagagggaaaggtttggctatactgacagagcccaatcccctccccacctccctcagcccctttgcttactgtctctcatgcctcgctcactgatggaaacagcagtgtggggctgggaggtctctttcccaagaaaccatatcccctagacctaggggaggctggtgcgaaacacagagacctacactgggaattcagagacctggatgtgagcccagctctgtcctcaactcactttgaaaccttgggttggtcacttctgtgctctaagcctcagtttcctcatctgtaaaacaatagcttggaacaaatggtctcaaaaggtcctttcaagctcagtctatgaacccaacacccctacacataccacatacaacaatagaactctcctacacaacccaaaataggaaccaatattgggtacgatgtatactatgttggtgatggtcacattaaaagcccagacttcaccatgtgtaacaaaactacattcgtgtcccctaaatctataaataataatataataaacaaaatacaagccctgaattggaaatgggagatggataccaaggcttgagtcctcagaacttagcttttcttggcctttacctctggagcaagagcccagctggtgcttttctttgctgttgcttctcagttccctctcctcaccctgggtggggtctctctcaggggtgttcattgcccgtataccttagtacttggcctagtgatcaaagcaccagtcctgggttccatgtctcatcaccagatggggctggtgaccaccccacatggtgctgtgagagttaaatggggagtatgtgtagtgcacttagcatagtagattgcaccagacatatcttccaacagtagctattgttattcactagtggagagtagaatgaggccctggggagggtgagagcagttctctaagaagtgtggaagtctaaaccgcagatgtggccaggaggaccctcccaatccacacactggcctccctgccccttcctgtatcagtgccaactttgtcctgtgcatcaaaaccctgactccatttcatgggttgctactgctcatttggctgcgggaaggccccgcttctgaaaataaaattgcctgtcagagaaaccctaaggatcaggattccggatctgggcagggcatggacaagttgggtggcagtggcaaaagcccctccccatggtctgccttttcccccagaagcaagttgctgggactgttgcataaaatggctcccacctccagtgcccagacagcctgcgctggggtgaagctggctacacgtgcactgaagctggcaggcttggggagaggtgagctgaggccaggtatctgcttcctttgcccaggattttgatggtctctcccctacacccacagtgggtgtgaacaacaaagacccaatcttttgatggtggtgaggattcctctgcacacgctcacactcacgttctctacccccttcttttcaacgtggcccacagcacgattccagaccctgctctattgtgctcagaggaagcagctgctggctccagcccgaatttgggagtgctttgatatgcagccctctctggggccctgccagtactgactctagatgagccctctgcggctgctgggctcacaaatcagccttctcaccccttcctccaggagcagtgttggatgagaatctcccccttacacacatagatcctgtgtttgttttgtctgcttttgtttgtttgtttgtttttgttttcctgttctgttcaattttataaggaggcatagcttttggacttggttgcagggttgggtttggaacttaataataccttggattgacaaaggcgccttttcttctaaagaacacaaaccttgatggttcttgcctgggtgtggttctcacctgggtgagcctggctgtgagggtagggggcctgaggtcaccccaaccacagcttctgtggtcctactggcagcatgttctagacagacctgtgtggagctggggaaaggagagtggagaagtttgaggaagctgcatgtttatgttttgtgttcctccctcccccaggttggggtcagcgggactttatttggatccaccacaggtcttttcaaccaaagccttgcagaaacaggctttaccccatacacacagaagagcaacgacttccttgttaagagtctgaaaatctgggtgagagcctgtcagacccatggcctcagagagcaggaaaaatcctttgcaactgggaaggaaattcagaagacaaaaaaaaaaaaaaatgcaggggaatagggggcgggggctagtctttatacatttctttctttctttttttttttggagacggtgctcactctgtcacccaggctggagtgcagtgttaacaatcatggctcatggctcactgcaaactcaacctcccagctcaggcgatcctcacacctcagcctcctgagtaactgggactacaggcatgtgccactacacccagctaaccttttaatttttttgtagagacaggatctcactatgttgcccaggctggtctcaaactcctaggctcaagcgatctgccaaccttggcctcccaaaatgctaggattacaggaatgagccaccgcgcctggcctacatttcttaaatttatgttttaaggcctgactacagattacttgcctgttttattccatggaaaaagtcatgctggtccagggacattctcattttccatcaagtgatggcatgcagccgtagaaagcaacatcctgtccccagatgagataatttttttgtgataattttataataattgtatctatctggtaatttcctccccccgcctctccaaaaatacttagttgtggatagttttaagtgctatatcctgtcatcctagactaatacatcttaacgtttttagggaaattcctttttagggaattccttggaatcagtacgacctgcctccagaaaaatgttatgtctgtttctggaggcccatagacattttttttttttttgcctttttctccattgcccaggctgcagtatagtggcaccatcatagttcactgcagcctcaaactcctgggctttacacaatcctggcctcagcctctcaagtagctgggactacagcacacaccactatacccggctaatttttttgtacagagagggtctctctatgtcgcccaagctggtcttgaactcctgggctcaagcagtccttcagcctcggactcccaaagcactgggatcataaatgtgagccaccacgcccagcctgagctcacgctataaatgccccatattggtttttctccctcagtttccagacaacccctgctctgtcctgagtcccatatttctgccataagaagcaggttgcctcaccgttccccgggggctgcaatgggggcatcacaggggactttgtgaaaggcattagaaatgataaattccctagtgatcaagtgcagctcagatgggacagctggcctcccacccatccctctgactctcagcttaatcattgcctaaggagtggttttcactcggttaatttaatgagtgctctgtatttctagtacacacgaaaaatgcaactgtatgatcttccagccaggttgggcctcttggcttagcttttcccagagcttggtgcttcatctttgttcaggaagaaaggaggtctgtctctcttctccttccctccaaatgcagacggaaagtctcgtcctctgaggacttgcagaaaggaggaatgtctcaggagggatcatttggggagctgcactcccaaggagttgagaagcagcctggttgagtaactgggaaaggcaaagcagcctgacttggagaggggcccggattaatgtgattccagaggaggtcccggtagagagaagtttggggactactgacttggagaaaaatcagaaacccgggtcttaagagcccttcctcttcaatccttaagccaggcattgtgcctgagggaagaaatagtggctcttatgagctctgctagaaaagtaacccttcaggccaggcgcggtggctcacgcctataatcccagcattttgggaggccgagacaggcggatcacctgaggttgggagtttgagaccagcctggccaacatggaaaaaccccctctctactaaaaatgcaaaattagccagtcatggtggcaggtgcctgtaatcccagctacttgggaggctgaggcaggagaattgcttgaacctgggaggcggcggttgcagtgagctgaaatcgtgccattgcactccagcctgggcgacaagagtgaaactccatctcaaaaaaaaaaaaaaaagaaaagaaaagtaacccttcacagcttacccaatgcacatccaagtttccagtgacacctctgagcaggctaagcagctggtggctcctgccaagccctctcctcggaactgagcttcacagcttcaggtgccagtcccttgctgacactcccagtctaagctgtgtgttagtctccaagttcagaaacaacacaatacatgggtcataggagaagaacctcgactgaggctaaaaataccataaagttaatcaggcagttttattaattatgaatttattaattcaaaacctattcaaggattttagttttttttgtttgtttgtttgtttttgttcttttttttttgaggtggagtttcactcttgttgcccaggctggagtgtaatggtgcgatcgcagctcaccgcaacctccgcctcctgagttcaagccattctcctgcctcagcctcctgagtagttgggattacaggggtgtgccaccatgcccggctaatttttagtagagacggggtttctccatgttgatcaggccggtcttgaactcctgacctcaggtgatccacccgcctcagcctcccaaagtgctgggattacaggtgtgtagtttaatgtcttttaaacctaagttgattgaatgtagtatgataatacagtgtactgatttattaaaactctaaatgaaatgatcagcaaaatcatactatttgtgaactcatcattgctttttttgttgtttgttttgagacagagtctcgctctgtcacccaggctggagtgcagtggcgcaatcttggcatactgcaacctctgcctcccaggttcaagtgattctcccgcctcagcctcctgagtagctgcgactacaggcacatgccaccacgcccagctaatttttgtatttttagtagagatgggatttcatcatgttggccaggctggtctcacctcaggtgatccacccacctctgcctcccaaagtgctgggattataggcgtgagccaccgcaccgggctcgtcgtagcttttcaagtcaatagaaatctggtgtttgaatccacatcatgtcttcccttgtaggtgggcagttgcagtgtgtagtgtgcatgcacaccccagatttatgcccaactccactggatgttttctgggtggggagtcatccatacctccctcagcggccccgttcctagagacgggaggcccttcccactaagacatattcctcctgctctccatggtgcaatgtaaacatcttctttctcacaatgtgggactgtggatttaaatttattattgctaagctcagatgttttaaagcttcctgtctacaagcctgagaaaatctcttcatactctcctttcctcctctctagtcaaattgtagccctggctccctaagacacaaccctttagagacccagactgcaaatttctttttttttttttttttttttctgagatggagtctcattctgttgcccaggctggagtgtagtggcacaatctcggctcactgcaacctctgcctcctgggttcaagcgattctcatgcctcagcctcttgagtagctgggattacaggcatgtaccaccatgcccggctaatttttgtgtttttagtagagatggggttttgccacgttgaccaggctggtctcgaactgctgacctcaggtgatacgcccacctcggccttccaaagtgctgggattacaggcgtgagtcaccgcgcccagctgggactgctcatttcaaatagaaattagattatcttctaggatgaggagggacactttggccttctttgtcatgggaggctggcactctcctctaggaccctggggtgtgtcttgagagctcgtgcccagggctataacacagagaggcctgtgctgatgtcatcttgttctgccctttgctggcagggtggttctggggaagggcagaggctccgggtcccactctggggctgttttcacgggggatggaaggaccatggccactgaacgggctgcggtcccgtctatggacacaatgccaatgggcagctgcaacagtgcagccaaggggaaaggaggatgtgcgagttgccctggagagtcccttcccagagcgccgcctctgtccaccctgactatatgaccagtggaaccaagggtgtggctgaagctctcaggacaaaggccagggagaggaagcaccggctgttttttttagactctcttcgagcacccactacccccactgcccccaagcgaggccaggtgtaggtggcatctccagcccaggtggccatgcagctgccctgctgtcagggaggaggcgcgtctgcaagctgccttccttccggtgcagatgggctcccttgtggcctttaaagatcgaaaacaccactttgaaatgggattagatatgaatgggggggaaacaggcaaaagggaaaaaattctggcttcagaatagaagaaatggatcaaaaacacaaacagcttaacaaaataattgagaattggggctctgcagtcagaccattctgggttcaagttctaactctgccacttacttgccctgtgatctcagttgagcaacttttttttttttttttttttgagaaggagtctcgctctgttgccaggctggagtgcagtggcgtggtcttgggtcactgcaacctctgcctcctgggttcaagcgattgaacagcctcagcctcccaagtagctgggattacaggcacgcaccaccatgcctggctatttttttatatttttagtagagatggggtttcaccatgttggccaggctggtcttgaactcctgaccttgtgatcctcccgccttggcctcccaaagtgctgggattacaggcttgagccaccgtgcccggcccgagcaacttaacttttgtgccccagttttttcatctaaaaaatagaagacaatattacctctttggtgggcctattctgaaaactaaatagttctggagaagtgcttagggtggggttgtggaacatagatagcaaatatttgagtacttgctgctagtaattaggtgacctaatatgaagaaggagctcctggcagaggggtagggcaggttgataggttagacaagagtttggggatcttggcctcccttgctggcttggggtttgcaagatcccatgttggagcaggagggccgttccaccaagcggtgccggaagtgcttttagccgaccctgccactccaggcaccacctggcattgcttgaaaactgtcaaggaaggagcatctcccaccactcagggccacgcacgcacgtggcggccaactctgcagatggaatgagagcaagctgctgcaagtggctagagtgtgtcagcaagagtgtgtgcagtcatcgccagacagctcggcgaggcatacacaacggaaaacaaatgtgtggtattctggaatttaaagcaaaacatccaaaacaatcccccacatcagatgattttggttaagatcagaatgcctgctttcagtggaaaagggatttatgggctggccagtgtatgctacgcgtctggcaagcaggcagtggaaacttgaaatgggatttcttgtttagaaagaggttaccttgggctggggcctccctcccaatcagccccaacatcctaacgccagtacacttcactgaagcttttctcctctccagggcagaggaagggctccaggtttttaaatgatgctgactttgtccttgaaaggagggaagatttctcaactcgaacttgttcagaccaggtagctgcctaatttccagaaagatatgctgagaaaaagcttacggagttcctcatcctctgccacaccctggagaggggaccaagctgtctcccttctatcagggaggagacaggtcagcaagtaaccgatctctgcatggcatgtgctgtgcaccgtcagaggaagagtgctgacagctgggtcactcatgcctgctctgtgaccacgggcaagtcgctttacctctcggagcctgtttcttcatctctcacagggatgattctaactagctctcaggctctaaggcagcccactaagaatcagaaggggcagcagggccttgtagtgtaattctagtctcctccctgggaaacctctcatgcattgcattactgttgctcccacagggaatgttctcttgtaaagtaatggcctgcaccagcctgaggccaggctcgaacatttacacacaacgagccaggcatagcaaggtggtggcacccccaggctgtagctgtctagggccaccttcacccttccacccaggagccccccagctgcactagcacccctggaaagggaggccacagagtcagtaggcaggctaagcatgtgcttagggcaccaacaatgcaggcagctcaaggaatccagggaaataggcactttttttgagctttatcttacaagttcaactttttttatgttgaattgtatgggttgtggggtaggtaccataatcatctcagtgtctagagcactaaatggccacagaaggcagaagttggcctccccagggacccagcttgtcatggaatgttgggtttaagtgtatgtgtggacccctctccccagcctgcccttatggtataaaagagtgacatataatagcaggggccatttatgacccagggacattgctggggttggggggagtgggccaggagcgggcaaggagttgtcttgatagaaacgctgattcccgtggggagacagcaaattagtcactctccttaagccttactttccttatctgtgtaatgaaggtaataacacaaccagcgtcttacgattgttactgggactaaggggatatttaatgtaaagctattatatgggcctggctcacaggcagagcttctgtgttagcttctgctgctgttgctgtagttgctgctactggtacctctccttaacatttttcacagattgaggttgtctaagtgttcacattcatccatatcttctcacttcagttcatgaaaccacatcacacaagatcagtcaatgctgaaatttacctccagtctttctccctctcgaacacgaattggaggacgtatctttccacctgtctataaaacactcatttctgagacttccccagtttggggaagacggataaagaagggaatcagttttgcactttgctggaagcgcctgtaagaatgccccattggcagagactcgctttgtggagctcaacttggaaattaatttacaatggaaattgaaggaaaatctacttcatgtccacaccaagaagggtggcctcaatgcctctccttcagttcactccttgtgccttccaaaaggaagttgattcttcgtatgtagaattttctggacacctagaacacctacacccagaaaccaggtcccagagagatgcagagccacggtcaccattgcttgtgtagacaccaggggtaggaagtggaaggaaggtagcgcctgagggtgcagcttcccagggaccaccacctctcccagcctcaatggcgggagagaacaaacccaagggagaagctacgggccagcatcttccctccctccctcttggcccccaccagggctagggtcaacaccccaaattgaaagcatctgttgtcaagctgcagcaggcagggaaaccctgtcaccaggttaaggcttaagtcagagcattttgccaaattcaacacgtccaagcctcccacttgtcccccaagaaaatttctcagggattcacatctttcccagtcaccccctggccagtgaggaagcaccgtgcatcgagaagagcatagctttgagtcgtctatgtggagctggttccatctgagctctgcctcttcctggctgtgtctttttgagtcagttgcttaaaatctctgagcctgattcatccataaaatgagggtgatgagaggattcagtgagagactgtacataaaccacctcctgtaatgtgtcgggggcgtgggtccttgtacatagtaacttctactgttaaattgctactgtggtgttattttccctaagctagacaacctgcaacttgaccattagcctcttttttttttttttttttttttttgagatggggtctctgtcacccaggctggagtgcagtggcgcagtgtcaactcactgcagccttgacctcctggatttaagccatcctccttcctcagccccccaagtagctggaactacaggcgtgtgccaccattcccagctaagtttttgtattttttagtagagactgggttttaccatattgcccaggctggtctccaactcctgagctcaagcattccgcccccctctcagcctcccaaagtgctaggtcaggtcagaggcctgaccatcagcctctgagtgtattcttttaaaaaattgtttttctagagttcggggaggtttgaggagaagtccagtctcatgcataacagcgagctggcctagggagcacagccggctgcagaattcaggggggaggttcttaccaggagtgccctgctgcaggttgtgggagcctctcacgggcccactgagtcaccagggcctgttaccagaggagagttcacgcaggcagggcctgggtggtggatgtgcatttgggagccaaacgcaggttccaacttgagccctttaccatgacttcctggctcagtgggttcagcacagagttgtccagccgttctctctcctttcttacctcttcctgccttcccacctctctgcatcctcacccttaatggtcacaatgccgcatttccagggtgaccccaggttccctccccgtggctcacagtgctggtcaaagcatttgagcccccaaatgccccactctccagatcggagtgtaaagtagtaggtgccagtcctgctccctcgtggggctgggcagtgagctctccctaacacacacaaagcacctccagctcagaggaagctcacacctcccatccatgccttcaggcttttcggcactggcatttagaaagctattctctggattcagaacccccagagagagcttttctctgtccttcctgattattggtgtgtaaatgaaggcctagagtagtggttcttaaacttgagcgtgatgagagtcacctggggaggtgttggaaaacagagtgccggcccagtcccactccagtttcactgagtgagtctaggagggaactgcgaatttgcatgtccaggttcctgggtcatcctgctgctggtctggggtcatttcgagagctgctggactggcatagagaagagtttcctgggttgcctttgaagataagaatttctgaaggtttgagcactgccttcagacagtggctcggtagaagtcccaagagcagaagttgtctggagaggagagatggcccccaggatgcgcctgaccaaccagtcatacctacaaaagggagttctggttctctagggctgtgatctctggggcttttcaacttggctgtagtaaaactaaagttagtaatatgccctgttgtcatctagaaattccgccatgagctattacagtagtttagttgggacgcttaaggagagcaagtcgtggcaatttcttctgctgattacagcggagttttggttttcttgttcccggtgtttactgtgtggtggagctggataagggagcaccccaaagcctctagtcctgcccaagtggctttgcccttccaaagacaacagccccagccttcatttggaggtgggagaggaggacacagagagggttggaggaggctgtgggcatcgggatcctgtttgttcttgctggcactgcctggcccggcttcctgaggagtgaatcagcccatccaaggcttggcatgcagtagtgagccaagggttgccatggagatgggcgaggcccagagcccacaggtctgggtggcctgacttgtttttaaatgttgaagtctgtgcgaagagggagggcctatctccacttctgtggctttcttaaagcgtgactggtattttggggcctggaaaactgctggtgtgggaaacttgcatccccagtatttggtgtgttgcttacttcctgggtgctatggacaactatgactaatgctctcccaagtttagtagatgacaaaaacaaaaaccagggctgacaagcatcttattgaaggagggtgataaagaggccaaggtttcctctcctgcccaacccaggaaaatcccctctctctctgttatctgctgctgtaataactcctttcagcagggttaatttgcccacggaagcagtttgtgatccaaggaaggacagaagcctaaaatctgagccaacagtctccctttagccttccttccccactttcctttggccattcccatccagtcttagtggagctctggatggcagtttgcaggtgtgaagcagataagtttatccattttcctccactacccagcgctcacacagactcccacacaaaccaggaaacagaaccccagtgtcctaaattcccccgctgccacccagccgccttctccgatcacaggaggacacaacagccgtccacagagggcccatgaattgacccagtgtcacctcacgtctttctcagggtttattattattgtcattttttttccctatggaatccggctggctgtaacacttcacagttttcagaatgttttacatgcatcactttatttaatcctctccttcaacctacgttgaaggcaggacaggtatcatactgttttttttccacaaacgaggactgtaacgttcagagaagctgaggaaagtgtgtagtgtcagagagctcctaggtagcagtgccagaattagagcccaagtttatatccatcacagtccagtcattctcaacagaggcgtgcaatagaatccctgggagcacaaagagtcccctgggattgctgaggcaggtgcatgtttagaaatcccccaggtaggctgggtgccatggctcacacctgtaatcccaagctttgggaggccaaggtgggtggattgcttgagctcaggagttcaagaccagcctgagcaacacggtgaaaccctgtctctacaaaaaaaataagaaaaaaaaaaattagccatgtatggtggcttccacctgtggtgccagctacttgagagactgaagtaggaggatcgcttgagcccgggaagcagaggttgcagtgagccaagattgtgccactgtactccagcctgggtgacagattgagacctgtctcaaaaaaacaagtattttcccagatgattctgatgcccaccccataaagaagcaggccctaggtggcacagctgtgcaggcagcagctcactattctttctattaagccacctgtcccttgttgaaaattgtgtatcattttgaccatgggctcagcagagtaaccaagtagccattgcttttccaggaggacaatgggaagttgggaagaaagttctccctccttcctggactccatccactcaccactgcccacctccaacccctcccaaagtggtagatatggccacctcaaggccaaggcatcctcagcaagaaatcactgtgagcaatgatctgctctccactttctgggctttccaaggcagctgaatagaggaagcataacaaatattttgtcctttttaaaaaatgggctgggtacagtggctcatgcttgtaatcccagcactttgagaggccaagctgggtggatctcctgagcccaggagttcgagaccagcctggacaacatggggaaacttcatctctacaaataatttttaaaaattagctgggcgtggtggtgcacacctgtagtcccagctactcaggaggctgaggtgggaggatcatctgagcctagagaggtcgaggctgcagtgagccatggtcataccactgcactccagcctgggtgacagagtgagaccctgtctcaaaaaaaaaaaagtgtatggccagtcagtacatattacagaagatgggacctggaggaaaagggggcccacgccaagagcacccagtttgtttgaccacaaaggatttttctttgcagtaggatttgtcccataggcaaacttggcttctcccacccggggagtggcatgcagtatgccctcccccacactgaaaccacgttcaacccactgctcttttcctcttcctctgggttacctcctctttttcagcacacctacttcaagaatttccatcaggaggccaggctgtacatacgaacctccccaggttctaactggaactggttttgcacacttggcatagagtccccagagcagccaggtgcccctaagctccgttacactttgatgttttttgtttaatcctcctttgaaattggaaatgtttcctgtaactccaggtgtgtgtttcagtgtaagatttctgaacctgtccctgcagcaagattttgcagtgtgagtcactgaaattctcatctttgcgtgggagccttgggtgaattgtgctctcagtggtgagtgggtgtggcaagggatgaccaggacaccattcattgtgggcctgagtttggggcactcttgggttctcatgtctcctgaggctcacataagccccaggtgaccagcttacctgtgttcgtcaaacataagagtgtttgactggacttctttgagggatgggggtgctggcagagttgcagataaagaccgaggacagcaatgcatgggttgtttttttgttgtttttatttttggagatggagtctcgctgtgtcacccaggctggagtgcagtggctcaatctccgctcattgcaacctctggctcccgggttcaagtgattctcctgcctcagcctcccaagtaattgggactacaggcacacaccaccacgcccggctaatttttgtagttttagtagagacggggtttcaccatgttggccaggctggtctcaaactcctgacctcaagtgatccgcctgccttggcctcccaaagtgctgggattacaggcatgagccaccgcacccggcctgcatgggctttttgtaaacttggttttccaaagtctgtataaggatttgcctgtaagtcacattgggacatgcttcaccaacagaaagggaaattgttgtcattccccaaatattccccaaccaaccttaatggggcttccttagtatttactctgggcaaataattgttctttgtggtttcttttttttttcttttgagatggagtcttgctctgtcgcccaggctggagtacagtggcgtgatctcggctcactgcaagctccgcctcccgggttcactccattctcctgcctcagcctcccaagtagctggtactacaggcacccgccaccacgcccggctaattttttgtatttttagtagagacagggtttcatcatgttagccaggatggtctccatctcctgacctcatgatccgcccgcctcggcctcccaaagtgctgggatgacaggcaagagccactgcgcctggcctctttgtggtttctgactcttgtgagacatttgaagatggatctggataaaaggcctgatgggaaaggaagctggtccaaatgaagaggacacaggagaggagatctgggtggatttcaaatactttttcactgaagtagtcattcatttatggagtaattacttactaatgaccatccgtccaaagcatggatggggcaaaggagataaaagaatgactcagaggtcccctggacctcaaggagcttgtgctctgctgagatgggaggcaaaccccagatagaggaagggcagagagtgtggagcatggatgctggagaggacaggatggatgcgacactggcctgctcacgtgcttggcttgctcaggggttgcatttgccatttgcatgggaggaatgggaggaaatgggtggggaagcagcaggcttggcttaggcgatcacgacagcattctaagagggacttgtactagcagaggcacaatgcacgaggctgaactcgggaaacttggagagattgcatctaaggagcagacaaggaggaggcagggttcagtggtgtcagctgctgtgggatcccaagacataaggattcagcaaaagtcttaagactcaccacccctttcgggttgggagagatgcagtgacgagccagtgaggacttggaggtggttaagacgccagctcaggggtgaaaggaaagcagagagcaccctgaaggagctgcgaggttgaagaaaaaaagggttctatttctggttttcttctgtttggatttttaggttagggagacctgtctgtgtcttcgcaaaggtcaaaaaagtggcagaggcagacctgcatagtcaggaaagaggttaattagtggagcaggttcttgaaggagacaggaagctttgaaagagagagacccctgcttctttattattgttttatacactttgttttagaataattttagatctacagaaaagttgcagagatagtgtagagaattccctcatcctcctccccagtttcccctattgtaccatctcatattactgtgtttcatttgtcacaactaggaaaccaccgttggtacattctgttaactgagctctggacttagtcggatttcactagtttttcatgtaacgtcctatttctgttccagggtcctatccaggacaccacaggacagttgtcatgccccctcagtcttctctgggctgtgacagtttctgtctttccttgttttccatgaccttgacagtttggagagaagtgctaggcaagtattttgtagactgtgctcagttgaggtttggctcatgtttttctcagggcctagcaccagtgaagaaacgaagaaatttccagtaaaacaatgggaaaaaatgacccttttcctctcggccctctcaaagggatggaaccattttttggccagatagcaaaggagcttttcccagcaaaaccagaatgtttccatttggcttttcttggaaacaaaagaggaaaccatgggcagggccgcgagctgggagtagaagctatgggctctctcctgcatccccgcatccccgcccgaccagctgggcatactacaggttgccatcctctctccagagccctgggaacagggcactgtctcattcagcatccgcatcaaacctgctctgctcctgggatgataggctggggtggggcagccatcgaagaaattacatggtcagcatgccgccatatgtctgttaattaacctgggtggaagccatcgaccccttggcctcccggactcctatattctcatttatggagtccctgaataattgacttggcaccctcttttaagggttaaagctctctttttttcttgctcctggcccctcccatttagtttctcctattattaaagtagctgaagctgggcgcagtggctcacacctgtaatccaagtgctttgggaggctgaggcaggaggattgcttgaggccaggaatttaagaccagcctgagcaacatagcgagacccctggctctacaaaaaaaaaaaaaaaaaaaagggtttaaaatattagccaggattagcggcatgcacctgtaatcccagctactcaggaggctgaggtggaagaatggcttgagcccaggagtccaaggctacagtgagctatgattgcaccactgcactccagcctgggtgacgagagcaagaccctgtctcaaaaaataaagcagctggggtgaaagccggatggggacaggggagcccctctatgccacaccagaaagtgagttctcctagaaaatacttcagagcgccttagatagcgctgcctgacaaccatgaaaggcattattgggtggcactggttatacaagttttgtgaccctgtgaccccaagccattgtgactcagccaactggagcaatgtctccaacagcgttacagaaaatggggcagctgatggttcacatagcatcccccccggccggtgaactcagtcattctgtcagaaaaggcagcagggttcactcctgatttttgtccaagtgttcccagtcatgcccctggccctcccttttctctgggttacttgaacctttctcctctcttattgtgagttgttaagcctgtgagaccgagacctatggcagcttttcccatttctccagagccagctgcttttccttcctggttgtagtgaaatgttgtagctttgacaaccaagccgcatgatgtaaggtttaaggtggggtccgaatgcgggggactcccgactccgggcttggcctggcccttggccaagataagagacctgagatgcttccttttccctcgtggttccagttctccagcccagcatccttcttaccacctgtgcacagagaccggatcaatgactggacttaacatattggctcagggtcctcgacattggggctctctataagatggaaggggccttacccctggaggttccactggggtaccctgtcattatctgagcgtggaacattcccagagagacgcagctcctgctcgtgagaggctgctgtgcagagcgtagctttacctcatcttacagcttagttccttggcagacctgggattgttttcgttcttttctgcgactcagttttcccagcagataaggggtggggtcataacttcactcatcaggggaagtaagatgacttgggagataattgcttgataagcacaagcctagagcaaaaaggacagtaatgagcactgtctcgctatctccctatgcgcgcaagagcatcacaagaccagggcgagagggaggaccagggtgagaaacaggttgtggctaaacgtggaccaaaattgagcaccggcctacagttttcaggttaacgcttttatgtccaggaggccagcagcttcagtcttccattcccaggggactgactgggcctccctggggttggggtggaaggagggaaggtatcacctttgtacttttttttttttttttttgagagggagtctcgctctgtcgcccaggctggagtgcagtggcgcaatctccgctcactgcaagctccgcctcccgggctcacgccattctcctgcctcagcctctggagtagctgggactacaggcgcccgccaccacgcctggagaattttttgtatttttagtggagacggggtttcactgtgttagccaggatggtctcgatctcctgacctcgtgatccacccgcctcagccttccaaagagctgggattacaggcgtgagccactgcacccagcccacctttgtacttttaatgctcagggacctggggggggacccaggccaggacttgccatgtacagagtcaagaccgcccagtgtgtgcttgtctagtcccttgtgtacgtgaattcaagccacataactcttctagcccagcacgctcccagcagggcccgcctccccgcctaagctaactgcagtgctcttggtcggggaacccatggtctgaatgcgagtaccctgctgggtccaggacggtggagactcacgcttctccccaaccaaacagtgatctgcttgctgcctttggattaggccaggagaccctccctcactggccttttattaagaaagaaaatcagactcgtctttgaactcagaactctcaagttcatttgaactctcaaattcttgtgcctgtgtgagtttttctcctctgccttgtccagccgcggggcatgtggcgtcgtacagtccttaccaatgtttggagctgcctgccctaaggtgcggctgagaggctgagaagatgctgagtgacagtccacaggctgggagtgcagggctggtggggcttcatgctggtaaagtgaggtggttctcccagagcccatttggtaccttcctcttcagatgcacttctgatattatcttctttattctttagccatacctaaaaggcagggaagggccgcatctcacaatccctgctttacagatgggaacactgaagcaatagaatatgaagctagactctgcagcccctcgtggtggaagcacacctccctggcaggagcaaatccccttatgctcctggggggtaggtgagtttgtgactgctgcaggcggaggtctgggtggcccttcccactattgccacatctgctgtccacccaacatgcccacactcactgccatatcgtaagggaaaggagaggaggaaaggaggaaggaaagagaggcctgtccacaccatgggctatcaatagctcctggagccgagaaccaaggtccctgatgagcgggctctgacataagagtgcctctgttgaggagggtggaccagcaaaacctgggcccacccactcctgcgtccagccggctaccacactggaggcctgtgagtcactcccccggcaagccctggtacgggtgacgacgagggagctcagctggcactggggggacttggcaggaggcctcctgcacagcatctagttcagcagtgccagcgaggggaggccctggcatgtcatttactgagcagcaggtctccagggacattgcagctgccctccctggtgcatgtgtgtccggaactgtgtaaccatcacccaagtcaacagttagaatacgacacccccagccacatggcacctccctgagcataatttcctcctccacctaaacatcaccactcacctgataacaatgcttttcctttatcatttataggcacatgtaagcgtctagctctgtgtgcatccctaaacagcatagcgtttttaactacatggaatcatattgtgtgtgtgcctgtggctctggcttcttggtttagcattgtgagatgcactcatggtgttgcgtgtagctagagttactcgttttcactgctgtatagtgttctgttgcctataaaataccccttcagccaatgggcggcaggtaggtcactgtttattcctcgcttgctggtatttttagtacctgcatgaatcaaacacaccccgtaatggcatctacaactaccaggcgtatatgaggggcagagaccaagggtggtcacaaagtcctttgcaagtctcacccttaagcgcgtggggactgtgttgttgctggcagccagaattaatgctgatgtcctgtatgtcttgcagcttgccgggattgctgtccttgccattggactatggctccgattcgactctcagaccaagagcatcttcgagcaagaaactaataataataattccagcttctacacaggtgagggacggggaaggctcagtgaattcagaccctggctccaacaaagttcctgcaactttggaggccccatgttgacccagggacttgggcttgggaaagacttttgctctagccacgctggccagtcgtgtccctttcaagttgtgcagtttttgtgtgtgtcgttgtgcctgggaatttgcgtttaactgatgtggtttcttttcctgatggccaagtcaggcatgttgatggttctctgatgtgatgtagcctctgccaaagttgtactcattcttgagggtttacgaacctctgttctcatctctgatgctctctcctgattgtcttcttatcctgcatcatttccttaattcaaaaagctttgtcctggggatctgcagtgctggaagaagatatagacagctttcctcttcactgttcagatagggactctgagactgggaaaaacatcagcctcctggaaaacacagcaacaataggagagactagaatggactctgcccagtcctttggacccctggtactggggtaaatgctgtagtgtttagttttatttgtttgtatttgacacgacttttgctttgggagagaggcttccagtttaaacctgcctgggatcctctgaacatgaacagacttggcaggtttctttctacactcaggcttcttggcagccttgctagaccattctatccctctcgttgccgtatcaccacgtcaaagctcccttcagaggagggggagcctggtgcctgccaagtgcagttgcccgcgtctgcgtgaattcagactctgcggctgtactctgcctggcttggaggtaggaaacttttcatttgtgaggaacaaaggaaacctcctatttttaggatgacgctgacatgttgtcaggctcaaaatgtaagtttggtcacttccttcccacccaccaaaaaagttatttttacaaacgagggagaaaacagttatctcccagtccctcagggagaagcaaggctggccagccacgtagaccttccctttcccacctcttgaactgggtagggagagtctttaaaaacagctcctttggttgcgtaacatttgagccctgtggatagttttgctgggtttactgctttttattgttagctggggttttttggggtgtgtctctctattatcggaaagaaagtgagagaaagcacaatgtatgtttagaaaaaaaactacacatacacacagagtttttggggaacaggtttctatagcgccctgacttgttttggcaacagaccattttttgggagtctgtgacaggcttagaatgctgtcctgcagagcaggagggaggagccgggtgcgggtgctggggaagactctccacactccacgccgtgttccagaagggagccctgtgctgggggagcaggtctgccggcaggagcaggcacagtcaggcctgctttcctaagcaaaagccctgtggccggcgcgtgtgtctccaaagagagactcagtcctcccttgtcctggctgcttctaacaacccactttttcttttctgttacccaaagcctctatggctgattctttatatttttagatgtgggagttaagaatctcatgggtaagaggatggaactgggaggaagacactaacatttttattttttattttttttattttttttttgagacgaagtttcaatcttgttgcccaggctggagtgcaatgacacaatctcggctcaccgcaacctctgcctcccaggttcaagcgattctcctgcctcagcctcctgagtagctgggattacaggcatgtgccaccatgcccagctgattttgtatttttagtacagacggggtttctccatgttggtcaggctcgtctccaactcccgacctcaggtgatcctcccgtcttggcttcccgaagtgatgggatgacaggcgtgagccacctcgcccggctggaagacactaacatttttgagcccccttctttgtgtgtcattcattgtcttgtgtgtattatataatttaatccccttagctctacgaggagtgtggagtgattctcatctcacaagtgcagaaaccgaggcctagagagctgaaataacttgtctaagcttatattccctcaagaggcagggccaggttttgaacccaggcctaaaagagctgcttctcgggttgtcattgccaggttgtggggtctccctctgtaggaatggaagaggtctgtactggctgaatgtgccccattggcagggatggggtggcgctgtcttggcccttttacttcacccaaattgcagtcagggagagaaacccctgcgtcggtggcccagccagcagctgacaggtgggaaagctgcagggtggcaggagaatggtgagtgccattagaggagctggggctcacctctgggaacctcacaggattcagatcctgcaggtcattgcagggccctgctggtggccggtggtcctacctgaagtgaccaggagggtgatttgaaggcacaaccccaaagagacacagatcccctagttggggtctaagggccactgtccacttagctctgccagggaaatacagatcctttgcagcgacaccccattcggggaagagagcggagctttgaagacttcgttctgcctgcagaagcgccggcaagggggatgatgcacggtaaagttagaacagcagcactgtgtctgggcacagtgatcagccctgatctcaggtgatccgtccgcctcagcctctagcactttgggaggccgaggcaggcagatcacccgaggtcaggagttcgacaccagcctggccaacatggcaaaaccccacttctactaaaaatacaaaaattagctgggcgtagtggcgtgcacctataatcccagctactcgggaggctgaggcacaagaatctcttgaacctgggaggcagaggttgcagagagctgagatcacaccactgaggctctgtctccagcctgggagacagagcgggactccatctcaaaaaaaaaaaaaaaaaaaaaaacagcagcacagcactctgagcactgcttaggtctgagctatgccctgaacgtcactgaacgctttaggaaataataattgtcgtccatgggcaaagggccaaggaggcgtcgctctgtgtccccttccccacgaggctgtgagaccagccttctgtactggcccagagcccttctcctagcagatgagcttggagtgccagccacaccctggctacttttccaaggaatagtcatggggtgaccgccccttgcactgggccaccaactgtctgcagagcaacccacaggccagcctgaccatgcagctgacttttcaggaaacctgaacagcccaggggtgtcttttctccagtggggccacagcttaccaagtagagaaagagtatataaccaggcagaaaagcaagtgaaaacctttccaacattcagaacagtctatggtaagtccagagcagctgacagccttatatgggccttctctccaatccaggcctggagattcagcccgtcagcaagatccctaatcccaggctgcaaacttgttggggaacttcattttcttggtcctaggccagcagcctttcccagctccctggtgtccctccagaaccatggctgctgaatgagggcatctaggggggctccagccagaggccgtgaatgcccccccttcctcggccagccccctatccatgatgaggtgcctggtgattttcaggacacgcgacacttggccttagtaagctggcatccccatcctggcttgtgacctggggcagttcattttattgctctgggcttcatttttctccctcctgaaaccagcacagcttacacaaccacagcacagcttacacacccactcccctctggggcaaagaagtacagcgtgtggcaaatggaattccattgtggcacttattcccgtgaactcgggagggcgggaaccaagacgaaaccagtcggggcagaggtagggctcctttgaacacctggtggagttatttggatataataaacttttattgcaggccagaggccctaccggattttgttctccttcacacaaacgggcgtggtgagtgctgtttgcaggacagagctggtgtagggacgggagcctgctgtgtcctctccctgggctaaactgagagccctggtgaacagtgaaaaacactgttccatttcttgtgtaaaggacacgctggcatatgctactgctgctacaccagcctttcttttttttttttttttctgggcctgtaatgtcagcctgaaaaaagcagaataaacaacccttaagcaaattaataccgtaatcctagagaaggctctgtgatggataactttttccatgagtcagacagcaagctaacattcgcttgttttataaaggggaacactttgtcatttatcaacagcagccttggctaacaagcttggggtgtaagcgatgagtagcttctccaaagggaagcactgaatagcccttgtaaaaaccagcccgagccctgcagtggttccgtgacttccatggggcctgcttccagatgagctgtcctgtagcttgccggctgctgctgagtccccgaacacagctgccaggggatcgcttcccttttcccgtgactagagagggctaaagctaggcactgcagatccgtagccatccacgcaagatttaaagcccacaaaacccgtgatcctaaaatcttcctctgctgagccctagcatgaatatttaatattaaccacaagccccattaggagcatgttctctttctctgcgtgggaaatactttctctttagtagctcacttgcagctaatccaattcccttggcctctgccaggaccgccaggttcaagaactgggatctggacttagagaaaacatgtctgcctgttcgttcccactccacggtatttcatgtgtttgtaaatccttttgatctcttaatacctcctgtttattcagcccctgctatggagctcaaaggagtgacctcatccttccttgacttgcccccattagatggggagaaactggggcctttctactgtccccatgtgagagaaccaaaggaggctgccctcttacccagtgctccatgcatggggctgcacagcctccccaagcccagcttgtggcctcaacagcgtttgactgcccaggaagatgcgacctgacttgaggacaagctacatttgtccccttgcccagtgtgggccaggcatgcacaagaacaatacccatattcttgcaacatggggtttgccagtaaccccacgtgacttgacctcacgacggatgtgggggagaagggggaggaacaaacgctctctgtgtgcattctgctctgtgctgcccgtgagcctcagctgcgggcagactgcatggtttgttgcctgcaaagtctcacccctgctcggggtgcagatgtgggacagtgaagtcagcgtgtcacctgccgagggttctcatcgagtgtcctgctgtgtattgtggggaaacatcacagactttctctctcgcgtgcgtgttttcagcccctacatcaaggatatctctctggtcccagtgaaaggacagtagggatacagcagcaggttaaaattcaccatggtgattattaatgattgttactcatgcttggtataattgagattaacaacagctagcatttgttgtgcacatgtggattatatcacttaatcctcacagcaatcctggaagtgggcattattgctactcctgttttacagatagaaaactgttgcacagagaggttaagtggcttccccagagtcacagatctggtgctctcgacatgtgacagtagcctctcccaaggctagatagaacatgcctgcaagacagggaggcacagagactttgctgctggttttcctttgggacccatgtagggctggggtgctgattaagggaatagtccctgcaggacagctgtggcttctcaagaatagaactgtggggtggcccctctgggcattcctttggtgggttgtggaacgaatggggccagtgctgctctactgtttgtgtcccaggaatttgcattgttctgggtttgggcaaaagttatagaagttgctgcccttctctcacctcctttccatgagccactcagatcaagggcttagtaatggtgtcactcatcctctccttagcaaggaggagcctcttcacccttaacctgcaataactgagttatgactgttaagatcttgttagcatgctatagagatcttttgaaatttccaggaacatacctctttaattttactagtaaggaaattgaggcccagagagggaaaatgtcttaccccaggtcacacagcaattagcatcagtgttagggccaaaagaagggtcttctgacacccagatctgtgtcctttgcactagagtcaggtattggacctttgccaagaggtgcctttgggtgttcctaactgtatgtgcctaaccaccacccagcaacagggcaaagaggcccgccttctgggaacaggcagagttggttccccccacccctgggtaggggggtgcctaggtgtgcacggccccttcctgctggaaatctgctctgacagcgtcctctgtaaggcagggtcccagaagttagccagagtgtggaaggtatatgctaactagcttgagtggattcatcttgctggaaagagctgacagactggaccagtttgcattccgaatgtagggattcccgtggatattctctgtcctggattgagggctaatgggcaccttccagaagggctgagggtaaggtaggagcgtgagcttgatgaagcagagtcatgcaagagaggctggtgggaaggagacctggggcagaggtggaagaggaggctgtattttaaggaaagggaacttcttccctgagatgaggggaataaggaggtggggaggcaggagttaggcagagggaaacaggaattgccggagatgcctgggcctctgaactgatgtctccacgcgtgtgtgcttcctctgtcctcccgcaggagtctatattctgatcggagccggcgccctcatgatgctggtgggcttcctgggctgctgcggggctgtgcaggagtcccagtgcatgctgggactggtgagtatcccctcggcatccccacagccaccctgactcccaccaacaaaaacctcagcaggcccagacccagaccacagaacagatggagggggatggggtcaggaaggtacccaaagggcatgagctgtcctcagcctgggcccctccccgatgtgaggcgtcgcccctcttcctttctggagcctgtcttatcgcttcccctaggcaactaaaaggactatgtttcccccttttctcgaggaccacgtttgctttttttccctgaatccacaggtacctttgccttctccttcttgtttcaaaatctgttttggtcttttccgaactccacggagtggattcgctccctttacttgcccaaatctcttgtcttttgtgaacaatagtagttgcctgctcactgactcttaactaacgccttgtaaatgctagttctgggctcagctgtgctcagctctttcctcatgtccgggcaccttgcctcactgtggcctctgtcctgggcttggttaactgcctgttctgtgaacttcttccctgcccctgctaggctattcatttgtgtcaccagatgcctgttcccagggagttgtccttcttccttgtcccaaaataccctttgattttcctggctggttggctgggactgttctcaccccgtcccctcgttgccttccagttcttcggcttcctcttggtgatattcgccattgaaatagctgcggccatctggggatattcccacaaggatgaggtaggtttttcccatgagatctcttgggtttgggagttgggggatgggggacagtgaagcagggggcaagtcctggctgggcactttgttcagctttcagctgttgaccaggcctcttatctcatcgcgtccctgtgtgccagcgaatgtgccctcctcggggcagggaatgtcagtgcgcttactgtcctgtccgagattgtgccagccatggtgttgactcatagtagatgttcagaaactacccattgggcctgtgcgtgtgtctgtctgtccatctcacacctcagcagcccttccccacaacttttagaaagattactcaggaaatacaggctttctgtgggctggacacccttgcctcctcctctgatctataaataacatgttcaagtgctgcccccatgagccaagtgctgcccccaagcctgtgcagggtccacagatgtttgaactatgggccccacatccggagacttggccatctagtatggggaaaagacatgaaattgataagggtcatagaggtgatttatatccaaagtactatgggatttgaaaaggtggggctgggaagggaatctcttttggcttcatagagaagggagccgtgacctaaaccttgaatgagagatgcgttcaggaggaaagttagtggaggcaggggacttccagtcaaaggggctgagcatggctgagcttgggcttacgtggggagccctgcagagttttggaccaggatgggccatatcagagtagtgtttttggaagggctgccttgtcatgttcagcaggaagggggaaggaagagagatgctgagatgctggaggcaggaaccctattgttttgttttgttcttgagactagtcaagcgcggtagtgagaaacagggaagagtagaacaaggacttccatctgtaactgacgtgagcaatccattgagataactcactacttttagcccagccaagggaactctgtttaaaaaaaaaaaaaaaacatgtctgtaagcaataacagctacagccatagaaataggaggggatcattgtgaaaaatgtcagacagatgctgaaggaaaaatgctggctgttggtctgttaactggatgtggtgagcatcaaaggggcagacagacattaaattgggatgcgccaggcgcaggcacataataatacatcccctatattatgatacaatagctggcacgtgctccagatttactctgtactggacatagtggtaaaggcttaacatgcaatatttcatttaaattctcacaaataatctatgagctgtagggacaaatgtggaaactccatacagagaggcttagtaatttgccaaaactcatacctaagtgaagagaaaaacaagatggaagcctgagaaaatagtcaggtcaggagtagtatttcaattattatcatcctctagatcatagagattcaatttaggagccaagttaggagccaagtagagctgaaggactgaccaaagtgtaagggacagggagaaacagcccgagtgggtttctggaggatgtgggaggagatgggaagtgcccaaaggccctgagagaaggcagtgctagcagctgccatctgcccagtgacgttgtccaagcacaggcatctggtggctgagagcttagagagaacaagatggaacgcataacatttgttcgtggaggaagatgtgaaaatgccgtctctgcccctctctcgtctgcccattgtaggtgattaaggaagtccaggagttttacaaggacacctacaacaagctgaaaaccaaggatgagccccagcgggaaacgctgaaagccatccactatgcggtatgtcgccttggcaaagacaccctcctgcgctttctccggattgtgtctgcacacagggtgctgactgcaccagaccagtgcaaacattctaatcgtcttcttacaatttgtttctctcatccccatccctgccttctcgctgtagttgaactgctgtggtttggctgggggcgtggaacagtttatctcagacatctgccccaagaaggacgtactcgaaaccttcaccgtgaaggtaaactcagaccaggatcctggtgtccctgcccccattgctctggacaaaccctgcaagcatgaaagtgacagcagccaagtgctgcttcagcaagacccgttctgcctgtgaaagggccccagggcacccatctctttctctcccactttgggccctctgtttactcaagggcaataaaacaaaggccggaccaggggaatgacaagtgttctggcaccgcccactgctgccagcccggaagctctcaagggcaggcgtgcttctgagtcttggactcccactctgactttgtcagtggctcctgtctgtaagccagagttaatgtccaactccagaatagtaaaaggtgaccttacaaccatgtcagaaatagacccccaagcagggcctgtccctcctccttccctgacgtcctgcccagattttagggatccactagcatagccatccctttgttcccctttccatccaccagccagaacttctcttatccccgaacactcctgtccccagcccaccctctgcccaccagttctcccgggtgagacgggggccatgggagggaggaggtgccctgggaggaaggattgtgtgtgacccaggtcttggtttgtctccccaagtcctgtcctgatgccatcaaagaggtcttcgacaataaattccacatcatcggcgcagtgggcatcggcattgccgtggtcatggtgagtggcaggacgtcgtcccaggagggggactgaggagttcacattgattcagcccatgctctacccagacaccgccgcactctgtgcatttgtcaactcactttgtcctcgtgcccttagtatttccattttaccactagggaatggagagacagagaggccgatgttctgatcaaagcctctcacctcctgagtggagtatctgaggctccccctgggcttctaaagagtcgactctcttagccgttaaggttcagggcacatgggtggcagtgctggcactgctagtcctcggagcatgtctcctcacgcacctgctgttcttctccctaagaaagtcgttcactagaggctaccggcgtgggaattgttccatttcctgaagtgcatctgaacatgggcagccagaaggaggtctctcgctaatcagcccctagaaaccaacaagggccaaccaggttccttggggtcatgtcctctcttcccatgagggacagccccagacggaacatggtcctcgctgggatggccttggctcactgagtcttcccccacccccgcctgcctctgccctcttgccagactgcccccaaagagagaatcgcctcctttcttagtggttatttgcacccttcaccggcatcttaagaaaggcatgaagcacctttcagcaaaatatacgacaataccttcttttttttctttttttctttttttgagacgaagtttcactcttgtcgcccaggctggagtgcagtggtgtgatctcgactcactgcaacctccgcctctctgggttcaagcaattatccagcctcagcctcccgagtagctgggactacaggcgtgtgccaccatgcccagctgattatttttagtagagatggggtttcaccatgttggtcaggctggtctcgaactcctgacctcaggtaatctgcctgccttggcctcccaaagtgctgggattacaggcgtgagccactgtgcccagccaagatataacaatacgttttaaaatagaatattaacattttgggaggccgaggcaggcggatcgcaccacagcactctagcctaagcaacagagcaagactccatctcaaaagaaaaaaaaaagagtattaaataacatacacacaaagacaaatgcaaaagtactaacctgtatggactaggactataggaaaacctggaatttgagcattaaatttggctctgagcttactttcccaccctgaaagttctccaaggaaaatgcttgtgcagctgactgccaacccccccagattcctcacgtcccgcacccttctcattatctggcctgcatctctcctgcttcagcaccttctgactcgtttggcctcctggatgccattctccttgtcatttttcttggactgggtgacccatgtctctccctttccctcagccttccttcagatcaaaccaccctgatcctcatgtttcttcctatctcctagatatttggcatgatcttcagtatgatcttgtgctgtgctatccgcaggaaccgcgagatggtctagagtcagcttacatccctgagcaggaaagtttacccatgaagattggtgggattttttgtttgtttgttttgttttgtttgttgtttgttgtttgtttttttgccactaattttagtattcattctgcattgctagataaaagctgaagttactttatgtttgtcttttaatgcttcattcaatattgacatttgtagttgagcggggggtttggtttgctttggtttatattttttcagttgtttgtttttgcttgttatattaagcagaaatcctgcaatgaaaggtactatatttgctagactctagacaagatattgtacataaaagaatttttttgtctttaaatagatacaaatgtctatcaactttaatcaagttgtaacttatattgaagacaatttgatacataataaaaaattatgacaatgtc

SEQ ID NO: 35 - DNA, 582070 bp, Homo sapiens
gtgcgtaatccttcagctctggtggtaagggagatgcagtgagctcccggctgggagagagggttattttgcaaaactcccctggtaccgtgcccgcggaatattgcaggaggtctgtgaggtaggtgggggaaaaaataacctgggagggcaatcagggagaggccagacgactggggacggcgtgctttgcaccctagaattgacaggtggtggcctcagcagttacaacctactacacagcatctcgtccgtgcgatacggtcacattgttattccccgcacccggctgaggagcgcagcgcggcagaccaagtggcaccggcgagctgtctctcttccggggggcgggggtggacagtagggagagggggtttaaagggccagaggacgagagaagagctgaggggcgcgtcgccagcgcctgtgtctccctggcgcgggttccccaggctagcccgctggcccgtccgcgcgcgcgcccccggcccgcgcgccccttcccggggctcctggcctcgcctcagcggctgcaggctcttcgtcgcgggccgggctgcacgcgagcgccctccgggcagactttcgtcccccacccccgggagcgcggaaggctcactcgcagcgcatggtctacccgcgccgggcggagccccggcgtccagagcgctgcggccgcggcggtgcagcagaggcgcctcgggcaggaggagggcggcttctgcgagggcagcctgaggtaagggctgcctaggaggctgcgggtttatttttcctcattctcttacttcatcacacactgaagcctcaatggagagtgtagggtgctgtggggctgatgtggggcaaagagggaatggggccgccgggcctggatggtcgtcttgacggcgtcattgtcgccccttgtaggaaatccgccaaccggcccctagcctttcgccctcatcttctctgcttcggcttccgcccttggacctcttgacaagtcactggggaggagaggatggagagaggctaagggagaatggagagaggcagaaggattcagggcttggaagccctggagtaggtgacggatgggcgcgcggtgcccagtgattgactgcaggcagcgggcgcggaagggaacctgaactacccaagagtttgctgggctgaggctccaggatgctcctgcgtgccctggtggctggggcaccaaggaggggcgcactcaagcctcggcatcaccaaggctctgccaggaacttttgggaagatttgtctggtgtttggtgagggggcttggacctttctagctacaagagtgtgttggggaaggaagaggctctcctcctttctcctgtcactttccttcatgcctactctcttcttccatcttcctgttttgcctccttccttcccgtttttcacaggccaccttccttgtgcggtacttcaaacacaaatcggaacccactatggccaacagctttaaagcgtgtataaggaggagcgcacagaagaatcgctcttaattacagtagttatatatgtgtgtgtgtgtgtctgtgtgtgtcacacacgtgcctgggataatttttagcaagactttgagacggtcacctaaaattacattgtacttacattaggtttacatcataattatatgatgccactgaacagaaatggtaactctatgcattctgcatcttagatctgagatataactgttctttgaatcacatgcatcgtttaatttcaaagatttccagctgctggaaaactcttggctaagttataagaatgaaaggcacattaagcataaaaaaagtaataaatgtccagatactatttttattagtagatcatactccccctccgtttccttttgccaaaagctgttattataccaattatattcataaaaacgaaacaaatttggagatttcagtgtttttacctacaacctgaagtgtaggtaggggtctagaatttatctgtacatgaattcacaagaagatagataaggccaatgatttcactgcaggtaaaggaagttgagcttcttctctctcaggatacctcatttcttggtatcccaagagagaaatccccttaatgtcaataaatatagcattggtctcttcagctcttcaaatcaatacttgtaggacttgactgtaatatgtttgctggctgtttctattctttttcattttctaaacaacaacgtgccaattttgttaatttacaaaaaataagtaagattgttaaatggactggaatttatgagatggcatgatcgatgcattgaggctgtttatctatatatctatcatctttctatttttcttgttacagttgggagctaaacaatgttgcagtgtgtctacttgtatttttatcagctgatttgcttttcagtttctttatggcttgacatattttgcaaaaatgaattgtcttaaatttctctagagagtaacctgttagacatactgtttgctttcaaaataggactgttttttgatttgaggaataagaaatcaatcatacatggttttctgatcttggagtcctttgcctgtctagagacaggtatttaagtatttaacagtaatagttactgtgtatgtacaaataaaggcttgtttgataaagatactggacacagaaataataattccattttggtttacaaatgcaatatttaaaattgtgaagaaataaagagttctaggttactcctaatatcttacttgacttaatttggctaaggagcaagaggtatatgaagaggtcttcagttagaaagatttggtggttagtaatttattatcatgtcatacaatttcacccatttctatttccaaaaaccttcaaacagcatagtttggacaaggtttaggatgttgctgaccacaaaacaaatgagttccttcaggcactggctattgtagccaccatgtggtaatacagtggacactgtgatgtgccaaatcgttcttcaaggagggacttgttgccccagcttctgggagtgtggtcaacagatggccttcaatagtcagactcttcagggattgcctgagctgtagaaagctcccttgtccaaggtcacacccctttccagcgcagctcacatccaatggctgatccatgtgggagtataaaggttgggccattgcagcacaactctggaaaactctgaaggatctttctagctctggagctccctgagggcttgcattgcagctctacttctctctttggtcctttctgtttccttccccatccttcctcaggtgtggataacaaggcggttcccaagaaaatagggctttgaacttcatttcagaattagcttgccagggaaacccacctgtgactatgttcttaccccatacattcattttgccagttttaatccattggtcttttgaaatgtggtgtttcaaccatcaaatatgatatagaagatgcatatgtggaaggaatttatagttgacagtttctttttcttccagcacttgaaaaatgttatgtcacttcatttcaggcctccctggtttcaatgagaaatttgttgttgtttgaattgacgttcccttatacacaatgcgtcatttctctctggagagtttcaagaatattttctatatcttcattttttggaagtttgattatgatgtgttttggcatgaatttcttttggtttgctctgtttgggatttgatgaagtttttaaaatgtaggtttgtctttcaccaagttgggagattcttaggcattatttcttcaaacacaaaagtgtttcagccccactctctttcttatctgcttctgtgactctgatgatatgaaagttggatcttttgttgttgtcctacaagaccccgaggcttggttcatcatttttttttctggtattttctctttgttcaaatagaaaacattcattggtctgttttcaagttcgctgattctgtcctctgtcttctctactacagagcccatctagtattttattttgattactatatttttcaactcaataatttccatttggttctttttgcagcttatgcttatttgctgagacattctattttttcattagtttctagagaatttgtatttgcttgctgaaactttttttttttttttttttttgagacagagtctcactctgtcacccaggctggagtgcagtggcatgatcttggctctctgcaaactctgcctcctgagttcaagcgattctcctgccttagcttcctgagtacctgggactataggtgcgtgccaccatgcccaggtaattttttgtatttttagtggagaagcggtttcaccattttggctaggatggtcccgatctcctgacctcatgatctgcctgcctcagcctcccaaagtgctgggattacaggcttgagccaccgtgtctagcctgaaacatttttttttttttttgagatggagtctcgctctgttgcctaggctggaatgcagtggcactatttccactcactgcaagctccacctcccaggttcacgccattctctggcctcagccttctgagtggctgggattacaggtgcccgccaccacgcctggctaatttttttgtattttttagtagagacggggtttcaccatgttagccaggatggtctcgatcttctgacctcgtgatccacctgcctcggcctcccaaagtgctgggattacaggtgtgagccactgcgcccggccaacatttttagaataaatgctttgtaatctttgtcagataattccaacatctgattcacttaattgttggtgtcacttgattgtcttttctcattcaagttgtggtcatattttggacattttagctattgtgttagaaggctctgggtttctatttaaatcttgtattttaacagataatcactctgtttagggtaacacacagatcctggcctacttttgtgggcagtggtttcaatgacaatttaatttctagaggctttgaggtgctgttagtctgcctggtttgtctggtgcttccggggctcccactgaacgctgctggtgccacctgaaggggaagaagaagcctccccaggccaggccctgttgtgcctctaggttagagaagtgtctctaagtgactttcagccttgcagaaataaggagcattcttagacctggaacttgtggcaggattcctggtgccagtgctctgaggccacctagtattgtcaaatggaccccagttagatgcagacaaggaatgagcctacctagatcatttcctactactaggttaggagtcgggagactctgggcctgggtaatctgctgttgaatagagagttggaagacatccactgctctattgctctactgttcctccagcctagaggtcactaagcagtccatttccctcttgccaccattctcagtcctccttgggatgccccttgcattatttttattttttaattttaaaaatgtttaaaaatttatttatttatttatttattttttgagatggagtttcgctctgtcacccaggctggagtgcagtggtgcatctcggctcactccaacctctgcctctcgggttcaagcaattcttctgcctcagcctcccaagtagctgggattacaggtgtgtaacaccatacctggctaatttttgtattttttttagtagagatggggtttcaccatgttggccaggctagtctttttttttttttttttttttttttttttttgagacggagtctcgctctgtcgcccaggtcggactgcggactgcagtggcgcaatctcggctcactgcaagctccgcttcccgggttcacgccattctcctgcctcagcctcccgagtagctgggactacaggcgcccgccaccgcgcccggctaattttttgtatttttagtagagacggggtttcaccttgttagccaggatggtctcgatctcctgacctcgtgatccacccgcctcggcctcccaaagtgctgggattacaggcgtgagccaccgcgcccggccgtgccaggctagtcttgaactcctgacctcaagtgatccacctgtcttggcttcccaaagtgctgggattacaggcgtaagccactgcacccggctttttaaaaacactctagtttaaatcctcaaccacattatccattactatcattgaaaatactagtttgattgtatttccctgtaatatatatctgttaggtgtggagacatagtttaaaccttagttcaagatagcttatttaaattaagttaattaatattactgtaattacagaattaaatgtcaaatcataccctgtctgtagagtctaagacaaaaatcttggtatgtgacgtttactctatggaacatttttttttcaagttatcttaatgcatttgaaaaatattagtacttcttatttattgccatctttgtgggaaaggctaaaaaatcctttatcctgtggacactttaaccttagagaaagtaaatgacattatttccataagcaacttgctgatattttgaatggattaaggagcagataccaggattctgtctttggctctcctagtatatcacagtgctgactcatagaattatggcattttcagaactgaaagtgatcttagagatcacctatttcaaccttattgttttatattttagaaaactgacatgttaaaaagccataaggaaatctaagttccttcagttcagtgatggcagggcttgtttattctgagttcttagaatttcctaatttgatattttctttaagaaatcagaattgccttcctttgagaaggcttattaaaaatttattttgaggtataatctctcagtaccccttttttaacaagaaaaactacttcaataagttgggaggacatgatttttttaaataaaaataggcttgtttgaaaatctgagggacatatggattaattatccagaaaaatgaacatatagtcaaaaatttgcattcaatattaagtatttatggattcctaggaaagacctccagatactgttttgtgttatactcatgcactaactgtggattgtctttgttggggaaagtgatagggataatgacttattttatagtctgggtcagccttaaaggcctgtggatggtgacagttgtcctgggcatgctacattggtatactgcaggatttgtctccctgcagattctagagtggcagtaggtgagaaggatgtagcaggaccagcaggtgttcaaacagactgactgtgcgaaatacaaacagggaactcagcccacagtgcttgctctctcctcccccataacacacacacatacacttacaacatatattaagattccttagaaagattctccatctgtttctttctgctctcaccttcttactatatggagaaacagtgtccttttgagatcattctttttctgataagattgctttagtggtcatttaaaaccaatttcacctatatcaaatgttaagggctgaaaaaagaaagattaaagcagcatctgctgtatatactggggggatttttctaagggtaaaaacaaaagcacatccatgttttccttatatcatggattaaaaaaaattaaaaccatagaatgataatgactgaattcagagatcaggaggcaaggccagtattgaaattacttttaagcagactgcctatatatacttaaaggaagctcctatatacacttctgtgactagtacaactccctggatgagaaataagactgaattgttttgcagtgtcatgatgtgtaccagagtgaaaaactcaatgcagaaaaatgggaatgttgtacaaaaagatataacagaatgaggcagtttttttctagttaatttccctagaaagcactttgtaggacttctatttgcaaggttacactttagtaactgaataagtgaggactgggaattggaagtcctgagttccagtgctgctatgcaatttattgggtcagtgacatcctgtgtgtaagcctaagggtataaaataaggccagcttatgataatctctaaagttctttccagcattatcatttggtgaaacttcagattagtggatattgttcgacaaaacatttgaaacaatttgtggtaggcccatgcaattaagtattatccataagaaagatctccaggaagttaatatttgaatttgaaagtagtataatatcttgatatggtcagaatttgcaatagtaagagtggtcacggttgggctaagactatccaactatatgggtatagcacatagcacaatttggggaacaaacattttgctgaaatgataatgacaacggtcatgatgcaaatatggatggcactagatttaactggacggaaggtgtggtagatactgcagattggctgaatatcaattcatcccctttctctctcatcttcctctgctatacaagttggaaagcaaaacattcaattttccagcctcccttgaaggtagcaatggcccctatgacaaagattagatgaaagcttctggggagcacttcccttctcgaacaaagcttcttaaaacgaagtctgtttcccctgtctcttaccccttcttactccatagagcatggatgatcctgtgagtggccatcttgcaaggatgaggaataaatccataggcttaggatgatgaagtggcaaaacagatgtagcttggatcctcggtggcattttcaagatgtatcagccctgcactgcctacctccaggcttactattccatgagaaaaatataaaccccttaattgtttcttccactattttgttagattatttgttacttccagcaaaatacttttccaactgaatacatgaagtaatttttaagacctcacattttacatttttgaaggataaaattagtgtctacagatctatgtaattactgaccttggatatgaaacttagggtactttgtaccaatactttcattttgaagaagtttgggtgtgaaaattttggataatttgtataattttcatcttatttttcattgcatgaagaatagcatgagacttcaagagtctctgttttgcattgcttagagaatagttcaaattttattcaatgggtaaaatttatattaagaaaactctttctgtgagtcatacctcctacttagccataatcttcggtaagatagggatacagctgaagaataccaatgagtcttgaaaataattgttttccccatttggattataggcaaaatgtatagcaaagtgggtttccctctttactatttaatgtgagtttgtttccaccaaatttcttctgacttcacactgtcacaaactgagaaatactttaaaaggaggagtgtaaaggtgaaagaaggttggaatttgcagtacatggatataaaagatggaaaataattttgtgcatatgacaaggaatctacagactctccatttggatttgtctgacttagtgcagggaattaatttttgctttaagccgtgtgataagagaaaaagaaggattcaattgggatatgttgataatattatagcagttaagattgcattcatttgggagtaaccaataatttgacatacaatgctacaaccagcaagaagtttattttttttatacaacataaagtgtcagcaggaagatagttcttaataaccgaggaaactatgaaggaattgggctccttcctgcttttgactccactgtaattagtgtctcctggttgaaagtgtcaccagttttctcctggtgaaaagacagttaataaagcttccaggcatgacatctgtaccacaggcaggtagaggtggccaggcacaaggcacacagcagctgagtccgtcctttttaataaggaaaatattagcttcctgggaagttgcatctggtagacttctaatatcttatgcaccagaactatgtcaatggccatacctaagtacaaggaattatgagaaatagtttgtttgtgttttaattgttgtctggaaaaattggtacctcccccaaaatgtcaggattctgttatataatgaaaaaagggaaaatagatatggggtaggaaaccactattgtcattgcatatgaaaatattttacagcttttaaaatatttgcggtgttgtctcataaatttgtaatctggagatttcttaagatatgatagtttaaaatggttataaatttttatttgcctcattatctaatttttttaatcagttgtcattgtgtcaagagagctgactgatatatgaaactgagtgatagtattgctattaagggaattataagcaaaaaagtcacaatttccttctacattaatgatgacatatataagtgtgaaattctgagaaatcagatagtgacactattgtgtactattatgtattatttatttataaaatgtatttgtgtactatttatttataaaatgttatgcttttttgttttccctaaatttttaatgacatatattaatattatccaagagcaaatatattttttaaaagaataaaataaacttggcttaatctcagcatttctactttgctatactcattcaagatattgacaaaaatatccttcataattgaaggtttattctccaattgatgtaggcactctacttagaagctgtttatccacatcaaggctaatggatttctttttctagttagttttttcacattaaaatagggagaggcaactgttctcaccacacatcaaaaggatgttataaagacaaatgaaataatggatgtgaagtgcattattcgctctaaaaggtgttatataaattctataaatagtattattaatgtgtaaagaagatgatgggtgatcatttccaaaagtgagtatcataaccaggaattttgagtgtggtcttcaatacaagtttttcaaagagaacaataaaaacaacatattcttaagttcttgcattgaaatatcactggtaaacctcactgtgaggggaagagaatgtacagaaagggcttcaaagccaggcaatttcttgaataatgcaacatagtaatagattttgcccagatataaaaagtcctttgggtctcttaaatggtttgtgagatgggaaaactcggattaaaatgtacgattccagtgctggaaatagaatcttaaatctagaatggaacttccaatgccatatcttggaaacaatgaggttctgctttactaaaaaaatcttcaataaaggcttttgtaatactgtcagtaaaggtttttgtcagccctttggacgccagcttttatttcttgaaaagtaaattttaaataggaagttgttccttatttctaaccatggcaaatgtcatgctttctatgtgctggtcactagggaaaatgaattgtatgatatgctgataatgcttgactttgagccagggagcaaggcttgtgtcttagttttgtcactaacttaattgtgtaactgggaaaattattcaattgtttcatgtaaagaaacagtctttaaactacatcattttcctctttaggctttttaggcatgcttaggggacttgtctaatggagatcgtaggggaaagtcacacctctgtgggaaaaatactgggtctctttcatgtcaaatttatggtgatgagtgtttacatgaaattgtcatgtgaaaagtgatctggaaataagtacaaggaaggaagctttgcttttctctgtgctttatgctcttgcttgatttgttgaagatcaatgctaatgtgtggggttccaagtggtgtatgctaaagagacagtagctaagaaggaacaaaggtggttagttaaggagagcacgtcatactttgtaaatcagattgtcaacattattttatctctttttgctttaccccaagtcattagaaagtcttgtttaattgtcttggctgtcttatgaaaattaagagggaggttaaattcaggcaagtgttttggacaggaagtagttccccttggcctaaagcactgtggtagtagcagtagcagcaataattagagagtagggaattcttaagagaagataggggagaaatgaagaggggaataggggaattgtggctgccaaacaccactagaggtccagctgtcattttccaaatggataattttcttccactgtgcatgacagaaatatatttcttggtcatgtaatgatactgagctattccaggtgggctgggaggaggaagtgggagctctctgacctgctgtttcaggtgagtcatgtcgtggctgctctgcttcttgtagtcacccagggaccttagagtagaggtgcttatttttaaaaattccttaattaatagactttattattaattttaattgatacacaatatgttaacatatttaaggggcacatctttttttttgggggggtgggtggggggtgggaggactgaatctcactctgtcttccaggctggggtgcagtggtacgatctcggctcactgcaacctctgcctccagggttcaagtgattctccagcctcagcctcccgagtagctgggattacaggcgtgcaccaccaagcctggataagttttatatttttagtagaaatggggttttgccatgttggccaggctggtctcgaactcctgaactcaggtgatctacccaccttggcctcccaaagtgctgggattacaggcgtgagccactgctcctggccaggggcatgtctcttttcagtacatggatttcaaagatgtcatgaccaactccattctgacagagcatggtggagaaagagtgggtgaatattatggtgtcctggaagaggcacacatcctttatatttatattattgtttagaactcagtcttatggccaaacctaattgaaagagagactgggatattttatctaagctgtgtgtctaaagaaaagaaagcagatatttttgtggatagctaatagtatctgcagtacaatcattgtgcagcttttttttttaaacctctttcctacagcagattccttgtttcctgatttttatatcttcctgtttcttggtttaatcttttgtattgataggtggagcatatcttccaatatcttcctaaggaagagtatttaaaggtagaacttttgaaatgttttacatctggaaatgtttttcttctattttacaccttgtggatgtagaattctaggaagccattttactcagaattttgaaggcatatttccatgtctgttggctgtcattttagccattaagaagtttgatgctattttgaatcttgatcctttaaatgtgaagtctttttctcatttgaagctttttaacatcatctcattctccttgaaaattttgaaatttcaagattatgtacctgggtgcaggtcatttctaattttggtgggggagctcagtgggtcttttctttctggatactgtactcttctttagttctggaagtttttcttctattatcaattttattaattctgaagtcaattttcccccattatttaacatctcagatcaacatgcacctttaatcgatggtgtcttataaaagccagatgtcaatcatgagttggttgtgtaaaaaacattctattgacaccttctgacatgactttgaaacaagtgctaacattagcactatattagtgctaaattatttcatttggttttcttggttctgttttctagaatttctattacttcttagtgatacataaaataatgcttgtttttgattgtaaggtacacaattattttatgtatgactaagaaaaaatactagcaatgaaactgtaaacagtgttttctaatcacttacacaattaattttatttttattgaaagaacatgcttacacttaaatataaaatatatgatatatttctcccatgaatgcataacaaaagaacacatactaaaatagcttagatgagttattctaaaaactgattcactttcagagttttaaattcacatttgaatccgtctcttcagaatcctgagtcactaatatctgtgtttatccatgcagttccactttatgtaccatcagtagagctggtcctgaaaagatgcttagcaattatgttgatcgagcttgccttgtgattcctgctttggggatgttgttaaacatgcttgattccccactgatcctatctcttcattacaggtatatgatttctagatgttaaaggatgctccattattgtttcttagatttccttgtgaccaaactctcattactgctatctctctgacggcagttgtaaaatactgtcaattgtagggcatatcctgatttcagggctgtaattggaaaatatacatggtatttagatgctgagccatcaggattaatcctctaaaaatttcttatcttttaaaaacaaattttctttcacatattacatattgttctgtgtatagttactcttctactgtgtaccttaattgcaaggtaaagagaaacttgaattttcttaaagtgaaacagaaatggcaagaatccctggggtccttttacctctaacagcagcacatctgctagaaaactcacctgacctgggagatgatcaaatcataaagagaaccacatttgtgattcaggcacccctttgcaggtacctcagagaatcatgtctagaagcagtgggaaacatttctccagctgtccctctgcatagattcacagattcacaattatattatacacatcgttctataactgcatgtattcactcaaaattgagtaaaaaaatcgatttctcgcatcattatgaagggctgtattgtattctattgaataagtgtactatgctttattgaatccattctctaatgatgaatattcaaatcactttcattttaattattggaatttaccaatgctttaataagtatcccagtataaatgtttggaattgctgagttaagggctatacacaatttaaaggctttttgacataaacttttcttccagaaagtgtataccaatgtatggtttcaccaactgtcgattgtagtgctagtttcctcctatccctctaatcccatttcctcatatccctctaattctcgattttgtcaagtcattggtcaatgtgaggagagaaaaacggtctcttggctattttcaattggttttctttaattactcatgagcctaacgaacttttcaatgtgatgtggtgtcctctgagagagaaagcagctgcccaagtagggttggagtgggcagggcagctggagtggccccttggttggtgtcagtagaaggtatctgtcaggaaaggagtagttactgctttggagacctggaaggtttggagaactctgtgatttaagccctttagccttcatggagatcctttttgttaccttcccaaagtagctggatgcctttcaggttccacagttattgttactttgaccatagtgtctgcgtgaatacagagcatcgacctctagactgtataatcctcatctagtcccagagacaggatggcctaggggcaataagtaggtgaagtgtaagtagggctttgagtcagtgaggattaaagggagtgttgggtccatcaagtaggtagacaaacacttttttttttttttttttttgaagcagactcttgatctgatgcccaggctggagtgaagtagtacaattctagctcactataaccttcaactcctgggctcaagtgaccctcctgcctcaacctcccaagtagctagcactacaggcatgcaccaccacacctggctaatttaaagaaattgtagagacagggtcttgctacgttgcccaggctggtcttgaacttctggtctcaagcaattctcctgcctcagcttcccaaagtgctgagattacaggcatgagccattatcctcagctggaagagcataaatgtttgaaggcagacagtataaggcatagtgagggaatagtaagtctagacaattttccacataggtgaggaatgggaggacgtgtttgaaaggtgggctgagatcacactgtgaactttgagcatatgaaagtgagttttaggagggggatctttatcttaatggcagtgggggccctctgaaatttttggaattctgatgtggtgggacctgacaagtgtcatgtagtaggaaatttaatagcattggaaagcattggaaatgaatgtgggtagtacaaaaggtttctatgtgtatcctgtacttggtaaagggtagaaccttttcagttatggctgatttgtgtttagagggacatataatcagttgaatgcttctagtacatgattgttgttattttctatttctcagaaaaagacaacttaagagtagctcattttttggacacacagatcaggcttttacaatatgtttaggttttaacagaataacagaaagtggaattgttttttgaacatgttatgtggtgtgtgggtagatatttagtctttagaaatgcaaaatgggctgggcgtggtagctcatgcctgtaatcccagcactttgggatgctgaggcgggtggatcacttgaggtcaggagttcgaaaccagcctggtcaacatgatgaaaccccgtctctactaaaaatacaaaaattagctgggcatggtggcacgggcctgtaatcccagctacttgggaggcttaagcaggagaattgtttgaacctgggaggcagaggttgcagtgaactgagattgcaccactgcaatctagcctgggtgacagagtgagactccatctcacaaaaaaaaaaaaaaaaaaaaaaaaaaaaaattgcaaaacgaattcagaagatgcatcaaaaacaacctatagaattgccatgagatcgtcagctttgccaaatgacagcaaacatataatttcaaatggaaaatacactcattaagccatttagactagtgaagttatatgtgttatattttatattccatttgtatatggactcatttttcatattgaaatattagcataaatgaggagatctaaacactgccttcatttgattgggaaattatcttaagtacatgatataggatatttaaagaggctttagcattcatagcttggaattggatagtttatggttattttcttatttttgttgaaatttaaactgcactttctgaaatagcatttattatactttcagatatcatctgtcttgactaggaagtcagtcactgaatgagtaattttgtttctggtattactgcctgacaaactgattttcagagatggtcataaaagcagcattaatgatcatttttagagatagaatgacaaatatcttgataaatcatgccttgtgcttaacttatttatgaatagtttctgctgtggatctttttggtgctcttaaaatgcagttaaatttgtagttcaagaattgaatttttattcttccagtaattgcagccaagggctgcactctctttcagcctagataagccacagtgacattcctaggccaaaagaaggatgcttgttgaaagctggtgggcagtgaaaaggacaggcagtgtatagcttccctttcaaatgcagaaacagggcttctccaaggtggagtgttgataaattatgggatattccaaaagtccttagtccacactttctgctctagcaaaggtaatttttgctatttattttgacctaagtacctttataaagattttgttttttcctctggaggaaggtaactaatatttattgagcactcaccatgtgccaagcatcttaggaaatgctttaaatgcagtctcatttaattcctactattaccttgtgatgaaagcattattatactaattttgaggatgaaaacattaagcctcagccaagtaatttgcttaagtttatatagcgagggctgacttgttttttttctttcaccaacccaaagtctatactttttctagtgcctgcttaagactcagtatgttaaaactttaaaaatatttattgagagtttcagtatgttccaggtatataacttagatatatttattttcattttaaagatgaagaaatggagaggttcagattaatacttttttcagcattacacagagccaggattcaaacttaggtctatctgactccaaagcctatgctcttacctaccacattgacttgtaagactttttcttaaagggttatattttaaaattattattaatatttacaattattttctatttaattcttttcttaagtacataaatgccataagtgctacccccttttcatgcaaatatagtgagttaatgtggaggatctactactaaatgcctttaggattctgctaaacgcttcgaatacgttagggtttctcaaccccagtgcaattgatactttgggccagatgattccctgtttgggagacagcctgtctcgtgcattgcagggtgtttaacagcatccctggcctctaccaactagatgcaaacaacactctcttttccccctacccagttgtgacaaccaaaaatgcttcagacattatcaaatatcttttgtcagagaggaaatcacctgaagttgaaaactaatggtctacattatctcatcttatccttagaacaccccatgaggctcatatcattatgatctcagctttacacaataagaataacttgctcagggtcatatgctgagaaatagtatcttcagggctcaaattgaaggcttacctatgactttggactaatttttgttgtatttcatggactacgtcttgtcttcaaacttaacttgagcatcctcaaggcttggctatgtcagattctcctttttcttttgccccaagggcacctagaaaagtacttaatacccagctgtgctttgacagatgttcattaagcaaatgacccattttatgtgggtcatatttaaataagcatattttaaataaaatagagctgagtgcagtaattaagaatcagacacatcacaggtttacatctcattcctgccatttattagttataggatcatggaaaaatttttgacctatttgatttcctcatttgtttgtgactaataatccctcctgtggataatgtgaggagtgagttaacatataaagtcatctagcatagtacaagacacaaggttacaaagttaagtacatgatagctactagtaatacaaataatattaatattaatgatagtaaggtggcttggattttctctttatattatgacataatttacatatacttttatttcaataaatttagaaaaaaatttcttgtctgcctaagacaacttgaaagctgctgtttcattaacgttaaataaaaattacatgaaatataaaatatacagaaggtaaatgaggaaattagggggaaaaagtaaagccaaacaaacaaaccaaaaaaaaccccaggaccattaaaagacaaaattaacatattgtagtactgaggtttcagtgaggaattaagcttagttcctttcatttcactaaagaagttttaacccttgtggtggctcaagggctagggcttcttttggctttgagagcagatgaattgactcatccctgacctcagccctcagccttctgctgatttggcatctctagcttccttccccgaggtctgaccttttgcctcatttcctctgactcaattttgggttctgttcttggctttcagtttctgctctgagagttccttttctaaatttctgggtcctcttgtaggttagttactcacttgtttcagtttctctgctggtctccttcttagggtatggccctccatgctctgccacacctgggttgcatcagctgctcaaaggcagcatttctcacctgctgctgctctccctgatccagggccaacttggacaaatcccttccaaatgtaattggccataatcatgtaggttttaactataggttggtggcattaaatttccaagacagtaaaatgtcagggtggaaattcattgtttttagatactggagggactttctgtgttttaaatgcctctcaattatttttttcatccattggcacactttggaatgttaatatttgtagtaaatactgaactacatagataatgctgtttgtggttctaggaattacatgcctatcctagggactgaggggacgactgtctcagcctcctatatgatattatgtatagaaatgcactggttgagaagctctattctaaagtctccatgaaaacacaaatagatagcactgggcaggggttgggagagagtataacaccttaaacaattattctctagcttctttatttctatttgcctgtcaactgctttctaagggtcctagacagccctggaaaagttgccccaggaatacaaaaccttaagaatgaagataaggacactaaagtttctgtaggggctggagagggaatacctaaatctattctaagacatgttgggagatactaaaactggaacgagattgggaacaggcagagagttaggaggctaccgagggagttcaggaatgaggtattgagggtttggtttattagctgctcacctgtagaggagtgagtcacttatttaaattcatacagaaaatatgtaagcatatatggtgggttggttgttaatactttgtcaaatgcatgccacttaactaatcgtgggaggtcactataattaccatttagatgtgagaggtatacggagggagaaagaagtcaacagtaatatgcaagttactattttaattaattgggggaattgaattgccattcactaaagaaagactaagaaaaagatacagttttgctgggggaaatggcatgttgagttttgaacgtgcaagtttgagatatttttgccatataaaataatacctatctgaaaagtatttggaaggtggtctggaactctcaggaaaaagccagatcagagtaaacagattttagaagtgaacaatatagagatctatacattttcattgtgggccctggaaatcatattcaaaatagtatgaaaaatgtgtgccagtgtagtttttctgaggagggggtcctctatagtttcaaagaatcactgctacagatagatgagataggtaaattaagaccttaatggcaaatgggtagaaattatgatttttaaagtaaaagaggaaaatgaatcaaggataacttcagggtatttttttctttggcagcagtgcaagagtaggagaagaaattggtttgtgaagctatggggttagaaatactgaatttgaattagaatgtagctttgaaaaataatgtgtccaataggcagtaggcactgcggcaaaaaaaaaaaaaaaaaaaacaacagttgagagatctggaatatagatttgtttgtcttcagtgttatgctgataatagaagccctgagtgtatgtgagctttaagccaattattagactaaaaagagaacagtgaagaagtccaagttttgagctttgggtattacccagagtcgagagccaggtgaacagaagggctggggcactctgggcacttgacagaaaattcagtcgtgaattgactacagcacattgcttgccaaagccttgcccgaggcagctgctggttgatggaaacagctcagggtgtgtgtcagcactcttcctctagctggctggactggtagtcttcaaatccttttgctccctcatccttataacaatatttaagtcacatcatcttattatatgtacatatgtttagatgctgtagagaatatgtgaaaacagaaatttatgaagatgaaatacattgataaaagatgaatgtaatatatatattcttataaccaatggattattttgtgcaccttctgtaatgcttttttttaaaagaaactttattgagatactgcttaagtacaataagttaaactcatttaaaaggctacaatttagtgactattgacaaatgtgttcaattatgaaaacaccacaatcaagatatttccattactctcgaaagtttcctggtgcctccttgctgtccattcctctctctaacccatcctttggcaaacactgatctgctttctttcactgtgaattagttttagttgttataattttatataaatagaatcatatagtatctgcttttttttgtttctgtcactcaaaggatgctttttttcttattgctgtatgggatatagcaaaatgtctttatacatttacctgttgattgtcatttaggttgttcccaggtgtaaactattacaaaaataccagctacaaatttttttttgtataagtttttgcatggatatatgtttttatttgtcttgagtaaatacctagttatggaaaagcttgatttttctaggtaattagaaagtgcttggctatgcaaaaattattgcatttcccagcaaaagtgtgttcattaattcttcattcaacacacattttatttatttatttatttatttatttatttatttatttatttattattattatactttaagttttacggtacacgtgcacaatgtgcaggttagttacatatgtatacatgtgccatgctggtgcgctgcacccactaactcgtcatctagcattaggtaatctcccagtgccatccctcccccctcccccccaccctcaacacacatttttaagcaagcataacttgtgctttaagagccaacataaatattacatctctgcttttgaagaaatttaatttaagatatataaatttggaagccatatagatgattaagttggtgtttcaagtcacgagacaacacaattatttatcaaatggtagttcagtttgggaatagaaattgagtactgttggctctgtaagtgagaaaaaatacaaccaaaattaaaaattaaactgagaataaatgcaacatggtatcctggattggatgctggaatggtaaaaggaccttagtggaaaaatggctgaagtgtgtatggaaactctgtactatctttacaacttttctgtaaatttaaaatgatttgaaaataaaaaagtttatttttaaaaaaaggttcattgagaaaccaattgtaaaattaggagtttctgttcaataaaatttgtcctgaagctaaaaaaatttaaactgaactaaacatttgatcatatatgacaaagatacattcttattaaataaaatgcacttatcagtcaataataacaatcctactctcttcaaagaatattggacaaagtatataaaagcaatcagtaaaaggattcatacatattgctatataaggaaggaaccatattcacctgcctcaagtttttacataaaaggacttcagctacagtaccttgttccgtttcctcatttctgactccatcctaagctaactgatcttaataattggtgagaaaaaaataacaactgcttggctcggctctttctcaattttctcttttcctatagatgcacctcagctgcttgtgtttcagttttagaagaatcttggaaggtccaagtgttatcaaaagtcaagtattcttttctgatcagcctaaacattaagaaagctattttttaaaatcagtgtgattcctgtttctgtttttagtgattattaatgcagtgtgtgtgtgtgtgtgtgtgtgtgtgtgtgtgtgtatgagagagagagagatagagagatttggttttggggtggggtggtgagtacaattaattatctcaacccttgacagctaataaacgcttgaagatatattaattctccatagtaaccaaataagtgcaacttaaagcaaggttgctgctaccgaattgataattcataaaaggtttcagaaggaaaaatagccagttttgaagaatttttagtgaaaggacctttaaactgtgagtagaaatataaattggtacaattttccccaaaggcaaattggcaatttgtatcaataaccataaaatggttcatactcaattttgattttatgataaaatctatggaagcaatcacagatttcatcacaaagatttataaacaaggatgttagtcaagcactatttataatggacaaagaaagcaaaacagccttattatctaatatggggatattatgctacttactattaaagccatgaaaatcattttttgaagagtatttgttgatttgggaaaattaatatgatacagtataaattagataaaaacaagatacaatactatatgtgtgttttaattcgaattttgtaagcagcttctatgtaataagttttgtaaaaagcatttttataaaattataattttgaaaaataattttgtaacaaagccaacacaaatacattcataaacatatttgtaaaaaagtattattaagtgagatgattcttgtgctccagacttgtagctgaggttcaaaactgtgaacaaagtttactatgtactgcacagaaatggtaatttttgggggtgcacaatgtttgtgaggagtgggcccaattaaaagggtgtcctcatgatgcctgcctgccacacaggaggcatctaaagccagtgtgaaattgttaagcagagaaccaagagccaggaaaataatcataagagggtgacaatctctcccagttaagttaggagagatttattcgttttctcttccctgtctttggtggagttagcctttaagagaaaagaggcagtatgtaagggtgctgcttcttgcattcagaaccttgttgacagggaacccaagtgtagctttcattggtggcagggtaatggaagagctttaaatttaaggttgaagattgaaatttgaaaatgaaaggactgagccttaagtatcaaagcaagactcttctgtaactctaaatttacatgtacatgtcagtacatacatggcttgctgatggggtcccaactcactgctgtgtacacatgaagtggtttttatttatttatttttactgtcgcaggtcaaactctagtccctccctttattattgcaactcttattgatgtgttgaccagactctatatctaaattcgttgtttggtttttataggattgtgtatgtattttgtacatcatgaatgaatgaaaagagctagaagcatacgccctaaaaattgaagattaattaatgatcttttagtcatagatttatccattttgtttgcatctttagacttccttgtattttcaaaaacaattatgtataataatttataatctcacaaaaatatatatttcaaaaatgtcttctgtaaaattataattgaagatgatattcattgtgttacttgatttacatattttacaaggacacacacattatttttattcttaaaaaattaacacctcaggaaaatgtttcttcagataaacttgtaaaatttcttttatcagatacaaatatagggcctcttctgctctagttgtcaaaaaaaaagctaaattcattgctcagctgtcactgttattgattttgccctcatcatgtctaatttagaatccttcagcagccttctaattattccctgctctaacctcttccaccctcaacaatgccttccaagggatatttctagcctgcaaatctagctatagttatttccacacttaaaattcttcagccactttctatgtcacaaaaccaaactatgggcctggcactctaagcttttcctgctcaggactctgcctaaatgtcttttcttgtgtattgttcttttcctgtttgcattctattcttcaaccttattaaattacttgtaattttcctagagagctgtgatcttttcatgcttttgctctatttcttgtgttcttttctcttccatcctccttcttcctattgtccctgtctctggagaaaattttttcttttcctttaatgggctcccttttacctggcagagtaatctattcctttcttgtgttcccagcgtcacatgtacagaactgtaattcttcattttcttgtgtgtgtcttctgtataaatattaggagattctcaaaggccagaaccacgcctttctcaattagctaagggcttattatacaatgaatgtttaatacatacatatatatatatgcatacatatatattcacacacacacacatatatatatatatatataaaataacaaaaatcttcaaatacattgccttttaaaatccatgcaacaaactcaggaggcagatgttattatacaggtaaagaaatggaagcttagagatattatatttattgcgttgttatttgcttaatacctgtctcttccactggaccataagctcaacaaagtcagggatagtattagtcaaggataagctagcataggttgcaataataaaacacccccaaatttcagtggcttcttaaaaaccccaacatagtttgtttctcactcatactgcatgcccattgtgagtgtggtgctcttctgccacacttagattttactctgggatcagtctaacaaaacagctgctaccttgaacattgccaattgccatagcagaaggagaagggatgtggaaccacacaagggcttttgaacttctgcccatgtttcattggccaaagcaagccacatgacctgtcctaaatacaacaggatgggtatatataatccacctagagggatggcaccacagagaaaaatgaaatatatggcagacaaaataatctatcatagataacccaactgttttgtccacgattacatatccaataccctatgcctgattcattgtaggtctcagtatatggtgattgcatgattgaatgtcagaaggcttgtaggagtgccggaactgttatttgattagtctaactccagagaccagtctgaatgactttgctatttatataacttggtctcagatatttacgaatatccattctctgcttattctcttgtttgtttttgttttgtttttttttttttttgagacagagtctcgctctgtcgcccaggctggagtacagtggcgcgatctcggctcactgcaagctccgcctcccgggttcacgctattctcctgccttagccttgagtagctgggactataggcgcccgccaccgcggcgggctatttttttgtatttttagcagagacggggtttcaccgtgttagccaggatggtctcgatctcctgacctcatgatccgcctgcctcggcctcccaaagtgctgagtcaccgcgcctggcatattctcttgtttttgctttgtttataattgttctgtaaagggcatgaaattagttgctgtgactgtaaaagaattacagaaggaatgaccgcagaggtagaaggattccaccaatgtatagctccagagaaatcatgttacgaattcacaaggaaaagaataagagacagtatcaacagagcaagagattgattagacaaaaagactacgatttggttggaaaaggtctttgctgtcagatatttcaggggagttatgggggcaactaagtgaaggttttcagatttaatcaaactaaaagatagaagtaatagcaacagtatatatctttcagagcattctgagactgaaattgggaatggaggtgtggttgagatcccatattgaaggaatacagagattttctctttgcaattgaaatattcaagtgggctcattctccattttcttagaaatagagaaggaaagaactttaaaaattgaagaatggattttatctctgaataaccacattaatctcattgaatgacaaatcaatctgaacaattcactatggaaaaaagaacttcaaatattgtaggttagataggcactttttgcaattctaataatcttgttttatggttaaaataaaatatgaaattataaagattaattgaagtattgctttctcactaatgagattagattgtctgtggtcagaaatgtgtgttagtacaagagatttagtaggggtgagatgaatttcctgaagaggaattctagaggcagagtaagagcatatgttttaagtaagatgtatcttagccctttaaaaaattactttaccaccttaaatttaggttttaattcagtctgtagtccttaatagcagtgagtcaatgggaaaattaatcccttgggttcttcctttcttcatctacaaagtagagatatggtatttacattgacattttatttaataaataataatgcatggaagtattgacaatcaatggtagctccaaagatagacaattagaaataattacagaaataattactcagccatccactttcactcctaggaaagagcaggaaaagtgagattagatggacagaatttgatcaactctggtttactttttgacacattgaaatctctgtaaggtaagtcaggcttaacagtgctgcatggtgggccccagcccaggaaattatttttccttagagcctcagaattcatttagctacttggaattttaataaagaattttaccaaccctggccataatttacaaactctgtggcttgcctgaatccactgaggagagatgagtacattgcatgagacagggcactctgtctctaatgatgactccagctgaccacagcttggtcaggcacagtggaatgcagcttattctgcccctagaaaggttaaagtggttgcgtcatttataaactgtcagtcttttttattcttgcttaaggttgcaggagagtaattgccatagcaacagttatcccttccaatgctgttaagtacaagggtgccccttggtagaatgattggagattcaggaagttctaatcctgttatgatttattcaatatttctttgattttgaaactatttaacaagttctttgcacattttcctggaaagtagcatagattctgtataatagctcttagggctagaagctgtctcctaaagaagtctactttctccagtcctggtcttcctacatatagaagttctctatttcatgaaaactaaaaaaaacctgctttatccagttacttgtgtcttaaatctattttgtctatacttctccctaatctacttctctttctgacttctcattttagataatggtactaacttctctttctacaaacagaaactcagaattgagtgtcattttatactcattctgcaatctaaaattgatctgccaattttgcctatttagtgcagttgttctcattcctggcatgcataagaatcaactgtagagtctttaaaaaatgtcacccttaaaacttatccctggatatgctgggatatgaatgtccatcttttgtattgtgaaaatttcagagatattgaaaagtacaatataaaatagaaaaataaggtataaatatagcaaaacaactgtttagctccaacttagctcagaaaaacagaacgttaccaacatagctgatgcatcctatgtattgctggtctagcatttccttcttcctcccttcaagggtaatttctactctcaatattgtatttatttttcccttagatttccttataggtatgtgtcttcctgagcagtagctggttaaattttgtttgatttttatgtaaatgccatactgtgtgtaatctatgacctgccttttttattctctattatagttttaatatttattcatgctgatgcctgcacctgtggcccacttatttagtgtagtactccactaatgactatagctcaattaattaatcttctctcccgtgaatggatattaagattgttttcggtgattttttttggccaggtgcacatctttagtgcatatatctaggagtgaaattgctgtcttaaactttacatttacattttcaactttgcaaaatgatgcctttttttccccaaagtggttgtatcaatttactccaacagtcatgtatgagaatttgtggtgcttcatatctctgtctttacttgttactgcctgctatggtttgaatgtatgtgtccctccaaaatttgcatgttagaacttaaaccccaaacgtggcagtactaagaggtgagactttctggaggtaatttggtcatgagggctctgccgtcatgaatgagattaatgccttataaaagggctggagggacctagctaggtcctttttcccttccgctgcttctaccacatgaggacacagcatttgacccttctggaggacatggcaagcaacaggtactatcttggaaacagagagatccaaccctcaccagacactgaacctgccagtgtcttgatcttggacttcccaatctccaaaactgtgagaaattaatttctattattgataatttgctcagtctgtgatattttgttatagcagcagaaacatactaagacactgctcaagattttttttccaattttatactagacgttgtaaagtggtatcgcatactgattttaatttccattttcctgataattaatgaggctgagcttcttttcttatttatatctgccattcttgcttcctcttctgaaaaattcttattcttctctcctgttgttcatctgcattttaaaaaattctggacaggctgggcacagtggctcgtgcctatagtcccagcactttgggaggccgaggcggatggatcgcaaggtcaggagttcgagaccagcctggccaacatggtgaaaccccgtctctactaaaaatacaaaaatttgctgggtgtggtggtgtgtgtctgtaatcccagctactcaggaggctgaggcatgagaattgcttgaacccaggaggcagaagttgcagtgagccaagatcgcaccattgtactacagcctggccgacagagtgagactccatctctaaaaaaaaaaaaaaaaaaaaaaaaaaattctggagaggtaattctgaagagcagccaaggttgagagtgactgtctttatgtcttacttctgtcccttccttattgtttccactgcgcctgcactggttcaggcccttgccatgttataacgtctcatctgtttgcagtactctttttactggtctctgagcatccagtctccccactatcaattcatctgaccattttcttctccctggaccctagttctgactgatcatctaactcccttgttcagaatattggtgacttccacttgcctgcaagtaacatctgaacgtcttatatgcctctttgatgaatacctacctacatctctaatgttgcttccctctagtttcatcatctacactttctttctgcagattctaatatcttgttatgtcaatatgaacactatagtttcttccttccatgcctggccacccatgagctccactgcttatctgctatgtaccccttaaaaatgaaagcaatcatccattctctgtcttctaaactattgcaacatgtaattgtttatatttcccttgttctcttgaccactttctacctggtgttatagttgtctttgccaggtagcaaatccaggaagttataatccttcattctcaccccccatctcagtgcattttatatactaggggatagcaattgttttgtgaatgaataaaatcatgcaatggaaatagaacccaagtctcaggattgtctttttttatttttattttttgtaaaatcaatcaattcctcaaggtcaataactgagtcttctcaggctggtgtgttctttttcctagggtatctttcacatacttagtgtgaagataaaaggagaccattggcttcattgtttaagcaaacatatttaatattgcacaatcaactaactgtacccttaagaccatagatacattaaaaaaattcttagtgatgaaaaacagtaatattttagtgtgagtatgcttaaagaaaatagtttaaatattttaggaattaaatctggtgaataaaatgaactaggcaatactacttttcataaaaaatattgacagtgctctgtatgcaaaaatattagaggattgattatgtggaaatataaaggaataagactgaatttcttatgtgacttataaattacccctaaagtaatttatatatgaatacttcacctacatatatatatacacatatatatttatatatatacaaatatatacatacatatatatatatacacacaattcataaaccaataaattctctgatgtgcatatttgacaaccattgctggcattttacaatttcatttacagcaagcccttcttggtagtttctttgtgtgattgatgctgaatacagctttgttgctgcctcctcaggtctgagttggtgtgcaggcaataaggaggtccagctttctgaagcccagttgaatcaggctctctagtgatgctacagatcatcagaatggttcatttgggtgataacaaagttacattaaacacaatctatctctcataatgatggcagaagaatgtgggtgttttctttcatgaaatcccccagtaccatttggatcagtagcagacatgattaactggtgaccccaaagcatttcttattccttacctcttttatctcttttccccttccattagaatttgaaaagccagatacatacatgtgaccctgttctggccaaagaaacttaagtttctgagaaagataatttgcttcccaaggaaaggggtgtatgaagagaggtcattgacattgctcttccccacctcccctttttcaattgtggacattgttgtgatgatattatacctggaactgtagtggtcagtctataactacaagggcaaaaccctaaaacaatgaggtggtggaacacaaggatggaaagagactggttcatgatgaccctgtttagcaaaggaatgaaccctggaaatactttcctccatacatatgcataagtaaacaataaatgcttttttgtttgctgctcatggattttctattacttgaagctagatacatcctaatcgatagaatcacatgttgaaagagtctactatccataattatctcaataatctgtttgaaaacatctattggggccaggtgcagtggctcacacctgtaatcccagcattttgggaggctgaggcaagcagttcgcttgagctctgaagttcaagaccagcctaggcaacatggacaaaccccatctctaaaaaaaaattaaaaacaaaattacctatctatctatctatctatctatctatctatctatctatctatctatctatctcaacattctcttggtgagttttctgttatctgtcctgaaatgagcttcaagaatctcctttagttttcctttcctgagattttttttttctttaaaaacaacttcttactcatcttccttatatgctacatccttctggtactggctgtgaatacttttacagtgatggttttatcatctttatggcaatctgactcatatttaaatttcatcatattttgcatctggactaacataagatattctgtattcaacgacatggaagacttgcctgatttactgagaaattgctaattttgtccctttagggagttttaacaaactcttcacctacaggatagttttcctttccaaagttcacatttcataggaattcatgaaacttattggaaaagctggcttatgggaactaggtgtatccataaatcctcttgatacttcttgcaaaataatattagtagtctaagttgttatttttctgtccctgcctcctaagttactgatcattggacttaaagcatagatatttaataaatatgggactttttattctagggaagaagttgcatataagctgctaatattcaggtagaattttttaaaaatttgctgaggctgagtgtggcctagcatggtagtgaagtccctgggaccataatatttaataatagagggcttcatatattttacagactttttcctcctgaggtcccaccaggtactcagagttactttgagggaagattagaatgaatcctaagaaaactgcccttgttctctatagtgctagctgggggaaggaatagtagccactctgagattgcccacacctacctccctaatcttcatatggacaaatgccttaatctgcaggaggaagagtaactaaaattgtagcctgagagaactggtgcaaatccactgcgtcttggggaaaaaaacaggaaaaataaaaatgttctactctgggaaggggcaggaatgtaggttttgtccagcaatacttccggaggagaaggaacacttaggaaaattacaccccctattgtgacccaggttcacaatgcctgattaagaatgaagctgaatcagaatattagatgctttccacactctttagccctaccccaccatgtacatcaaataaaaataattgtgacatacaactgggaaagctccaacaaggagtttctcttttgagagaggtgcaaagggatagcccaaagcaaagaaggaaggcttctgaaaaattactgcatacattaagcacagggtatcactagagaaatttgaattctgaaattcactgcgtgtaatcatagcaactgcaaacatcaaaaacagcccaacacctgattagattaacacaacccccttccctacgctaaacatttagcagaacaaaaggctcactcatcgtcaagcattaaaaaacatttacttccatatctactgtcaaattttttgttgaaagctggctttcaacaaaaaattacaaggaatacaaaaatgcaaaaaaaagtcatttgaaaagacacaaatcagagcccgtctcagatatgacatagatattggaactatcagaaaggaaatttaaaataactgattagcatgttaaaaactctattggaaaagttagacaacatgtaatggcagatagataattttagctgagaaatgaaaactgtaagaagcaaaggaaaatgctattaaaaaaaccccacagtaacaaaaataaagaataccttcaactgactcactagtggacttacatagttggggaaagaatcactgaatttggaggtaggtgaatggaaatttcccaaaataaaactcaaagagaaaatagatttgagaaaaccgaagaagatcagagcatccaagagctgagacattatcaaacagcctattctacatctaactggaatcctaggaggagaaaaaagagaaaactagtcagaaaaaaatatttgaagaaataatggctgagaatttcccaaaatttggtaaaacgacaccaaattatagatccaaaagctggaagaacatcaagcaagataaatgccaaaacctcacacttcaacatataatgtttttaaaagttgaaaaccaaatacaaagggaaagtattgaaagcaggcaaaggaaaaaagtcatattatctgcagaagaataagaattatagcaggctcctcatcagaaaacatgcaagccagaagacactgaagtgacgtatttaaagtgcaaagaaaaaaattgtcaagccagaattctatatttttcctaagtggaaagaaaattaaacgccttctcagaaaaataaaaactgagagaattaatggctatcaaatcgaatctaggaggaatgtaaaggaatctcttcaagtcagaaggaatgtcatatagatcaaaaaatggatctacacaacgaaatgaggaacatcagtaatggaataagtaaaagtataataaaatattttcattgttattattattataattctgaaacagagtcttactctgttgcccaggttggagtgcagtggcgtgatcatggctcactgcaacctctgcctcccggtttcaagccattctcctgcctcagtctctcgagtagctgggattccaggtttgcgccaccatgcctgtctaatttttgtatttttagtagagacagggtttcaccatgttggccaggctggtcttgaactcctgacctcaaatgatccgtctgccttggcctctgaaagtgctgggattacaggggtgagccactgcacctggtctccttatttttattcctctaaaggatagctgactgtttaaagcaaaattgtaaaaatatatattgtttttgtaacatataatcaagtgaaatttatgacaaaaatgatacaagagatgggagggaggaattaggaatctactggtttaaggtccttatactacacatgaagtgatgtaatattatttaaaggttgacttattttgttaaaatatgtaattataacccctaggaaaatcacttaaaaagtttaaaaaagttataattaataagtcaatttaggaaataaaatggaataataaaaatgttcagttcagctcagagatggcagaaaaggaggaaaaaagagacaatgagtaaattaaacaaatagacgacagctagcaagatggaatatataaactcaaccagattaataataactttaaacatgaatggtctaagcatgccagttaaatgtcagagattttcagataggataaaataacaagatccatctgtatgcaatgtacgaacaacaacaacaaaacactttaaatataaagaattatataagttaaatgtaagaggatatggaaagatataccatgacaatgctaactgaaagaattatggataactatattaactttaaacaaagcagacttcagaataagaaatattatcagagacaaacagaggcattgcctaataataatggagcaaattatccaagaagatataatcctgaatgtgtatgcttgtgatgtgacctcaaatacatgcagcaaaactaccagatttgaaagagatagaaacaaatttacaattataattacaaacttcaacactcctttcttattgacaaaacaagaaggcaaaaatcgttaaggatatagatggcctaaaccatgctataaaaattatgtatttgacctttatagagcactccaatcaacaaaaacataatttttatttttctccagtgaacactgaacattcacaaagatagactatattctgggccataaaacaaactttaattaatttaacagaatagaagttatactaagttggttcttggataagaataaagctaaactagaaatcaataacaaaaagatctattgaaaatccttcaatatttgaaaatgaaaaaatactcttctaaataaactcagggtttaactaagaagtctcaaggataatttaaaacaaaacgaaacaaagcaaaaagcatctggtacagataaccaaggggaggagaaaagctagaatgaaccatgttgtattaggttatagtcagagatgttggtacgatctcatgtttagcttaatataaatgtaaatggagagatacaaaaataattatagctaaatgtgtaaattagctctttctgttaagaactagagtcagtgacacttcagtggcaatgagcatacagagaggtttctaaacacagttcttctaaaaggaacaagggactcttaagacatggccagttctagggctggacaggaaaatacaagatgtgcttgaaatatctagtagtgtcagaaaataaataagtgctcagaaacaagtttacagaagccaagctgaaaaatgcttcccatggccaaaattggaacaatttgagcaagaaaataaattatgtggcactgggctacaacacaagtataaaataaatacacgtgcatctacattgatataaacaaatgattgaaaaataaataaattgaaggagaccaacctttcttacagaaatattacataatctatgaaatattgtctcctctagggggtcaagcttaactctctctgccttgagtgtggactgtactttgtgtcttgcttccaaataattgaatctgcaaaaggaaataaagtcgcttcacagtggagaactctcataaacactgacttgcctaggtgaccaaggttaacatcaccagtgatgagtcatgttgatagcaagtaacctctgataaaatgagatgagaagcacacttcaactctgtggccttcttctccaaaacacctagccacatttgaatgagaaaaccaccagacaaaaccaaattgagcaacattctacaaaatacatgaaagctactccccaaatctgtagaggtcatcaaaagcaaagaaagagtgagaagctctcccagacaacagaagagcatggtaaggagacatgacatttcagtgcaatgtgatcctggaatagagaacaggacactagtggacatactagtgaaatttgagttatgtctggagcttagttaatagtaatgtatgaatattagtttcctagttttgaaaaatgtattatgtttatagaatgtgataacaatagagaaaactaggtgatgggtacaaaataattctctgaattatccttgcagcttttctgtcagcctaaatttactctaaaaattgttaaaaataatttgaactaaaggaaaatgcaacatatcaaaatttgtgggatgctactaaagcaatgctgaggtacatttttagtgccaaatgcctctattgaaatgaagaatgagccaaattcagtaacccaagcttacaccttgagaaattagagaaagaagcttagagaaagaagaacaagttaaaaacaaagcaagcagaaggaaataaataataaagattagagcagaggttaatgaaactgaaaacataaattcaatagacaaaattaatgaaaccaaaagctgactcttttaaaggatcaatataattggtaaacctcttgcaaggctgattaagaaaaactgacacacattcctaatagcagaaatgaaagaggggacatgactagtgaattcacaaacattgatagaatagtaaggagaccttataaccaattgtatgcccataaattcagcagctttgagggactggatccatttattgcaagataaaaactatcaaaaagaatattagaaaacttgctagttctatggctattaagtaaattgaatttttagtttaaaacctgctaaaggaaactctaggctcagtttatttcactggcaaattctatgaaacatttaggataaaatagtcccagttcttcacaatctcttccagaaaatagaagaggaggtagcactttccaactcattttatgaagccagcattttatgaagccagtcaaagatgctataagaaaaataaactctagatggatatctcccaggaacataaacataagattcctcaataaaatattagcaaatcaaattcagcaatatgtaagtgtgagactcaccccactgatgaatatctagagctaaatgaaagcaaaaatgtcttcattcattcagctattttaaaaaattaaacacacatttattcagtatttactgtatgttagaacatatatcgggctctgggggtatcacttaaacaatgacaggaagaagaacttctgttgtgacccctggagaaagagatcagtcataaccattggtgaattccttttaggagacacaaaaatgacaagacgtatgcatgccatcttcttgagattccactatattgctgtgaatttgatgttgcttatgaaatctttggactcctaatgataggtgtaagattgaaagaaataatcacaatgtctagacaaatttttatgaagattctgaggtaggaggtaaaacttaaggctttggaagcatataggaacacattcagtgtttccattgcaggatgaaactttagaagacagaagatctggaagttgaacagctgctgtctgtaaacttgaataaggactgaaataacttttggctaaagataaaaaaaatgatatgcctgcaagaaatgtatttaattggcatctaggtaacttggtcgagagtgatttaaattaaatgtggaaatgaagagaggatttggtccagataaacatatgactctaatttctatgtgtcgagcacagagcgggaaggcaagactgagagtttttgtggcatccagtgaaccactgtggcattcagtgattcagttcctaagaaaacaattaggaaaaggcccaggaatgctagtggtaattcagataccaattcaaagatcataggaaatatggaaagtacattgagattataacttgggaaagtataattggtcttatatgtatcactgagtcctggtaggatagaagtcaactttggaaatggtggaaaggtatgtcttctgacaagttcaatcagtggttttcaataggaaataaagagtgagggtcgtgagcatcagagtttcatgtggaattttaaaagatctgactgagtatattgctcattaaagttattaggtgggtataaatagtatagcaaatgattagaagattataatagtcattagtgttgctcaataatattttgagttctactcttgagctcagggaatatagcccttctgtgcctcttctttaaagttaatgtgactttctatgatgaatgaaagtgagcaaagtgaacaatgttatcaggatttggagcacatttgcatgagtgagaaataaatgattgctgtattaaaccatttagatttaaggatgatttgttaccattgcataatctagcccatcttcattgatacaaagatgtatgtcattgtaaaaatttatagattggtgacaatatataatagatgattacagaagtggatttcaaccaagttttaactataaaaatgttttctcgaatacaagcttacagagattcccagtatataaagagataaattatgcaaccgctttgttagaagcaaagctgcactggtctctagccagcctttccacttctcccctcaccagactttaaggcgtctgaggtccttgtgcccaatttgtagaacctctaaagcataacaaaacacagttgaaaaaccatagctataggaagatagatttttagctcaataaaaggaagtactttcagtcagaaatgtccaaagatagaattggctactaaagtagtgagctgctgtcacaggaagtgttaaagcaccgattggttatactaggcagatgtagtgatagaaggtattctgtcattggctgaccacttctagcatcagaggttttgattcttaggcctcttccaatggataacctcttctattattctttatctctttctccgccttatttttcttcattaacattatcacttgtttatgttatataaaaattcatctatctgtctagctagcagtgtactgaacaaattattaaattttcagaaattttttgagtcagttgttaagcacagacattgttaaaaatcaaattatttaaacttacaattaaattatatcaaaaactaggtaatgacactcaaaatgcatcactttctaattacttggctacattttgctgttacctgtgctcttgagcttatttatatctatcatgtctgtatggtggatatattatataatgatgtgctatataatagtgtgctatgacactgagtttctttaagcaagtttctttctttcgttctctgtttttttgagatggagtctcactctgtcacccaggctgaagtgcagtggtataatctcagctcactgcaacctccgcctcccgggtttaagtgattctcctgcctcagcctccagagtagctgggattacaggtgtctgccgtcatgcccagctaatttttatatttttagtagagatgggttttgccatgttggccaggctgatcttgaactcctgacctcatgtggtccacctgccttggcctcccaaagtgctgggattacaggcgcctggcctaagcaagtttctttaagcaaacatttgggatatgatgttgagtttcttgcttaaagaatgtgtaaagcacttagtatgggcctcttacacagtaaaacttaaatgcatgtcaactattaagtttttataccttatatgaaggattttaaggttcacgtctatatgcaatgtagaattttaagaatgagaaagggcggaaaaaccagtcatcatttgctgagcctctaccatgtgccacagactgttctagagaatttacactaatggtcaaattaacccttcatagtcccatgagagaagtataatttggtataactaataccattttgtaaatatgggaactgacagaggcttatatatagccacgtcttcatgtctaaattgaggcagaatccagatgatagcccacttatttttgactccaaatttcattttgccacttcctgggttgtactggtaagttctaaatcacaccaaaatcaatagagaagccaagcccaactttgcatccatggtgttacattggtagtttgaaatcagttatggtgcaaataattacatcacaggaatcatcaaactctgtaaatcagagcctcatccctggagaactgcttgttaaatatttaccagcacaccactctatccatctatagctctcaacgcctctggaatttaacctccataaagatacagaacataactttgttatggtctttgttgtcagttctcaacaaatatttacttagtgaataaattaataatcaacaaataataggacaagcaggaatttttaaataagcaagttgagaaaccagggaacatgaatgggaaggtttagatgagactgaaattgctttctgtctttttctggtatgcctgctttggctgtttcatagggcagtacataggaaatggcatctaacactcttcagtttgtgtatagaaatcatccctctctgttctccaaagagagcttcccaaagcaattcctgagccattcacaagtttctgaagaaaatttgacatttttcctctcttgtggtgttcatcgtaagtgtatttgcaagcaggagtcctgattttataagcagagaaaaaattttaacccagaaaagtgttaattttcaaaatacgatatcggcaaacctaaaggagaagccaagaccaattaggtggccctcagagaaggctgagcaagtgaaaaataaaggcaaatccaaccatcttgagtaggtttcactgaaaagttctcttgattgaaatctattgattatcttagtgaagtcactagaggcatcaacttttgaccagtttggccacatttaaaaaatgttttctgaggacatttgcactgctgtagactggggtacatgagctggagcactacaggcagtttccaagctgtctacatgttaggtctgcatggcagttcaaaaaattgaattaatgtccagaaattaaatatcagaggatttctactaaaaatctggatttctgagttgtcttgaaaattcagtatatccagtaacaccagacctgtattcccacaaggcaaaaatccacttgagtgaagtagctttactctcttttttttttatttatatatttttatttttatttttttccgagatggagtcttggtcttgtcgcccaggctggagtgcaatggaatggtctcagtttactgcaacctccgcctcccgggttcaagcgattctcctgcctcggcctccagagtagctgggactacaggcacacaccaccacacctggctaatttttgtatttttagtagagatgggattttaccatgttggccaggctggtctcgaacttcctacctcaggtgattcacccgtctcggcctcccatggtgctgggattacaggcgcaagccactgcacccggacttagtagctctgctctctttagatgggtcatacattctccaactcaccgctatccttaccatgtccccatgtcctatacatggtcatctctactctgtaagatcatttatctggtcttgtcttcctctgatatcgcctcagagtcattttcctcatgtaatattgattacatgtgatggttgggtgactagtgagggctacagtctgttgtttagcatccagtaattcttctgcgaggctgttaaccttcctggttttcattttcctcaggtgtaagtgaagtggctgaaccaggtaaacaccggggcatcctattgctctggccttctatgctcacacatactaagctaagcacttgtactattctctgacagctttttttttccaactcctctacatttttgtttcaactcctttacttttttgtttcaactcctttacatttctatctgtattgctatatctctctttctccatctttatctctgtctttatcatcatataaaagattattgttctcttactctctattttagagaaggatgcctacagcttatccatggtagagaggaagggtgttggatcttcatgaaggcaaaagggcatgcctgaccgtccattctccattcttccttcctatgagagacactgctttctttgtttatagtcttcatggggcttaagcagtaaaacacgctgattctaaaagaggattccagaactcagggagaagacttcctttttacttccgccatacttcctgagtataatttgctcataatataaacagatcaactgctggaaatgtcactgtatactttttaaaattaaacataccagccagcaccagtttttttttttttaatcattaagctaccatggtgatagatatcctagacacatgtatataaacaacaatttacatttttctatatatactgccctagagattatttatatatcatgtattgtatatacaaaggacaaagggcttatcacatttaaatggatagcttctgaaacagtatttctcaagtctggttcacagggataaagatactacctacaggccgggcacagtggctcacacttgtaatcccagcactttgggaggctgaggcgggaggatcacctgaggtcaggagttcaagaccagcctgcctctactaaagagacaggggcaaaactccatctatactatactaaaaatacaaaaattagtcaggtgtgatggcccatgcctgtgatcccagctacttgggaggctgaggcaggagaattgcttgaacctgggaggtggaggttgccgtgagtctggatcatgccactgctcttcagcctggacgacagagcaagactccatctcaaaaacaaaaacaaaaaatactatctacaattcattagcatcttcagtaacttgagaaccagagtatatggggaaagctgacgaacaaccttactggcatggattttgttttctttacaattcctatatttttaacttttattttaagttcaagggtacatatgcagatttgttacataggtaaacttgtgtgtgtgtgtgtgtgagagagagaggtctgttgtacagattatttcatcacccaggttttaagcctagtacccattagttatttttctacctccaccttctgaaaaggcccagtgtgtgttaccttgttcccctctatgtgtccctgtgttctcatcatttagctcacacatgtgattttattttagcacaactcctgtagtgtacttttgcagtattttctaccactttggatataaaacatcattgcaaaaataaatgcattttattttagtgtcatagctagctgggtagtacacagttgtttgaagggattgggttttttcctcttgacttccttttttgttcattagaagtgtatgtcttgccagtgaaacctccgcatgtactttttatttagagtccgtaagaacggacattatttttcaaaatgggtaaaatatttcactaatgcatttgttattttgtgttctagatcatcaaaaaaatgaatattgacaagaaatttaattgccccttgcttgtggaggaggacagagattatgtggaaataaaaactatagtagaaacacactttcaagcctttataaggtgtctactttagaaataattttgtttagaacagtttacattttgatctaattaatcttttcttcttccttcctttagattgtcactatatatatacgtatatgtatatatatacgtatatgtatatatatgtatatgtatatatatgtatgtgtatatatgtatatatatgtatatgtatatatgtatatgtgtatatatatgtatatgtatctatatgtatatgtgtatatatatgtgtgtatatatatacatatacatatatatatgtttttttcctcccatttctttattgtaggagcagatagtgctagtgatcgatttagccctgaaagatgacttgatagtactaggttactctaatagcattcctttactttctttttcctttaataagaaaggcaggaaaaaagaaattctgtttttcttggtgtttggaaaagcttcactaatgttaattattcttactgattcataagctcaagaggtttctgttgattaaaaatgacaattgcaagcacagtttctgtggaaccaaaaataccttgaagctagtaagtgttttgtataatttcattgtgttggatgatgaacttaaaaaggttgtattaagaaaaataatttattgctgaaaatcagttgtaacttgtggcttgtgcagtaggtgtgtaagatatcgaatttttgctgtatactttaggatttggaaatacttagactataagctataaacttaagttatgaaataacagttataaaaatctctatattatttacctccagctttccaagattagatcttttgttagatgcatgttttgctgtgattttattttattattttatactttcattcaataccaatgattttttttttttagtattctcctattatctttttctttaagttctgggatacatgtgcagaacatgcaggtttcttagataggtatacatgtgccatggtggtttgctgcacccataaacccatcatctacattaggtatttctgctaatgccttcccttcccttgccctccacaccctgacaggcccctgtgtgtgatgttccccttcctgtgtccatgtgttctcattgttcaactcccacttatgagtgagaacatgcagtgtttggttctctgttcttgtgttagtttgctgagaatgatggtttccagtttcatccgtgtccctgcaaaggacaggaactcatccttttttatggctgcatagtattatatgatgtgtctatgtgccacattttctttatccagcctatcattgattagcatttgagttggttccaagtctttgctattgtgaacagtgctacaataaatatatgtgtgcatgtgtctttatagtagaatgatgtataatcctttgggtatatacccagtaatgagatttctgggtcaaatggtatttctggttctagatccttgaggaatcaccacactgtcttccacaatggttgaactaatttacactccctccaacagtgtaaaagtgttcctatttctccacatcctctccagcatctgttgtttcctgactttttaatgattgcaattctaactggcatgagatggtatctcattgtggttttgatttgcattgattttaaatatatataaaaaaaataagccaagtgaagttagtatgtgtaaattgcaccacatgaggataaaaaagatggctgaatttcatagaaaactatattgtggcatctaaccatatccttaagactcagttaataaatacttctgttttatatgtatatgtttgtgtctgtgtgtgtgtgtacgtataaaatggtgagaagtatgaaaaagttgtaatagaagcaaatgaacataaattcctcaaaagaaagatagattggaccaagacatcatattcaatgttgcacactttaaaataactgatttataataaaagttttaaaagaaaaacatatagttatactaattaagcttgatgtacaaaataataccaaattggatttaaaaagaattattttcttaagatactaaaaaattatcctgatttttaatgagtagttacaattttattataactttttaaaagtttgtttgcctttagcatttcttaatattattgtaagcattaacaatactaaacaaaacaaaaaagagtttgaagattcagtcgagacaaatagaaataacagtaaaaaaagttcccagaaaatgcgagctatttaagggcatgagccatctcttatgttattttggttaaataaatgtctcagatcgttagctacgagaccctgtgctgggcactggatgaattagacacacttcctctgtccaaggtcagatgaagtggctatctttgctccttatgtgcatatttttcacctctgtacttttggtacctagcatagagctgaactcgtaaaaggcagtcaatatccccttgtcgcattgaatcaaatgtttgttgttagactgaacaactgaaatttcggaatcgctatgttgagtcattttgggcttctcagaaattttgtaaatgaaacagaatacaggtgtagggtattttgaacttgctaggatgcaaattatttaacaatattcgaatgaaatcattgtacttagaggccaggcacggttgtttacaccggtaatcccagcactttgggaggctgaggtaggtggattgcctgagctcaggagttctagaccagcctaggcaacatggtgaaatcccatctctactgaaaatacaaaaaattagctgggtgtggtggcacatgcctgtaatcccagctgctctggaggctgaggcatgagacttgctttaacccaggaggcagaggttgtagtgagccaagattgtcaccacttcattcactccagcctgggtgatagagcgagactctgccttcaaagaaggaaagaaaaaaagagagagagagaaagaaagaaaaggaagaaagaaagagagagaaagggaaaggaaaggaaaggaaggaaggaaggaattattgcacttagagttcattgccatttctagttatgttaatgcttagtatagaggagtctggggtaaggtacctgtgtgatcttggggaagcagcctactgtcctcaaactagggatttctccatctttaacatgagggccaaaaacgggttatgaaccagaagtcgcagtcatctaaggcttcaagggaggccttgaattacttagaatggtatgcaaaatgatttaaatatgtttgaaaatatgtttttttacttggagaggatccaaacttcaatagattctaaataagcctatattgccatctctctggtctaaattatctctagagtttattttacttcgaaaaatagtttttagtgtaacatacaaaaattttaatcaatagattaaaagtaggcaacaaaccatcaacatgttattatataagagaaattccattttggattgttgtctgttttctaccctgattgaataattaaaccgtcaagcagctaatgaacatttattgataattattatctattctgagtggcaataacaaaaggaaatagtgaaagatataccaataactttcttcaaagaatccattatctaattagaaatattaaatcaacttagtctttcccttcgatgtagtcatggaggtgaatcttacaccatggacaattagagggagctatatttaagactatatgggttttaagcgaaatagatcatttctagggtatttattagggagatactattttcaagatgttgtgctaatccagtcatgccaggcatatttattgagtattgacttgccagacacaaaaaaacactaataaatactatgtatggtctctcaacattaagaaagtggttttttttgcaggaaatacaaaaacaaataattatagtgtttttattcagtattataattcatatatgaaagagttgcatgggagaacagaagcggcactctaaggtgacccctttttgtgatccctggctcttagtagtttgaagtcttattgagtggtataataaaacatgcaaacaactaaaacataggacaacatatattgtatcatgattagctgcaaattgccatgctgtttctgaggaaggaggtatatttataccaactgtaacaaggaatatttaattcagcagatatttattgttactggatttaagtcctataatgttcatccgacttgttattccaagcttaagatggtacttagcacttggcatgtattcagtaaatatttgctgaacagataaatacatgaagacccacttcatgccaagaatagtgcaaaatacccacaaacatagaggcagagaaaaataagtttgtgccctaaaaatgctcacagtcatcatatacatgcgtgtgtatttattttcaaatcactatgttacatggtaatagagttgcatgcagagcacaagaggtacttctgaatcttcacagaagagacattgacattctcagagaatgggtggcgtctaggaggatgaataggagctcatgccaggaagatagggaagtggaggaaggagttccagacagagggtgttacatatgcataggcactggcatttgaaagtttatggatttgggggataactatcaaatgtgtaggatgtatatgggtaaaggaaaggagaaagatgagactggagatgtagaccattggggaccatttcttaaagggccttttctgtcatactaaggagctggagtcattctgaaggcctgaggtacactgaggaattatgaagaaaagaggttatataggaggtatactcaggaagtttccagaaagagtgaggctgagaaggcccagcttccaacacacgagagacatacttacacttcctaggaaggcccctagagaagagaattacaaagattcatttgctggcttctctttcatcatttgtttttatcatttggagcctggatactccaatacctatatggcaaactttgccctttccttccccaaggtacagctgttaagagagtgcatgaaaatttcccactaccaaatgccatgggtggttatgagaagcacctcttgttaacagttaaaaagtaaaatacattttggactttcagcttttcatttcctacctatgggacatggaagaatgttcattggtgtatataaacttgagtttcttaatgtgaaaaataaggataaaagtttttaagtatatatatatgcgtttaatcagtctgttgaattaagtcagtaggtgttgaaagacaggatttgttttttttcccttaagtctgcttttatcttacatttgcaaataagaagttttgtatccaaacatattattcttccaaaaattttaaggataaagatgtacttttaaaagaagctataacttagcattttcttttggttaaatataattattctaaaaatggcatatctctacattatgtttgcttggtaaaactgaatattactcgcctgtttccacagtatgacataagtggaaataagacaattatagaacatcttcataacaaagttaccatataaagcttatatgagtggatggcttaattagattgtttttaaagtttcaggtagttcagtttcttttttcctggtttttactttctgtttgaccttcagagaaactaactgtatttacctcaaacatttcttatccacatgtcttcaatatataatcataatatttggtacatctgaagtgcctgacatctgacgcttctgaattgcttcataaatgtggatttaggccttgggggccagatggcaaaagtcaacagaataaaagtatttattaggtattcatgattgtactgggtgctgtactggataacaaaattgagaaagaaagtattttctatgatttcaggtatcctacaatttagctaggcagtccaaacacaaatacatttttgaagaggaataaaagtagtgcgcatggaagtgtttggcatcgccttgatgatagatctaacattaccaaagaaatgttgtctcagagctggactctcgcagaccgttgtgttctcttagacaaatggaagctttccagctaaaactggcttaattcattactatttacttggtagccaaaataacttactgccttattttgtgttggatttgaaattcaaaaaaaagtaaacaaaacaaaataaaaacaaatttgagtttcttgtaatttattttattatagggagttttgttccaagactgtttagtgaccaaaaccaaaaaggctgctgtctttaatatgtagtttattctccccacaaacacattacttgaacagcaactaaaaaaagagataaaaagaagtggggaggatatactaggcattctcttcttcttggctcaaagcttagaggttgtgaccagctggacagctttccagaaatcataagcagatactgggccaattgtttttattacagaattatggaggaattctgaggtgtaaatgatttgtaaagcagctctatttaggagtagttttgcggaggtttggatcaattcagtgggttgtagtttgacatatgaagtgataactgtatgcctagacagtcccagctgctgaatttgcaactacagtgaagagttctgcccacccccatctgtctaaggggcatctccacctgtcatttctgtactctggcctctatgacatgataaattgcttttaattagaattgcagacaatttttcattctctggataatgtcccagcgtacaacataacatccaacataactttggcagttcagaagtgagcttaaacaacatgcagtacttctctccacagttataaataattgtaaataatttgttgagaaatatacactcattgcaatataaacatgaaatgcctttatttttccaatctaaatttttagccctgctctgtggatcattttctagcatcctttaacaaaatcttggctagcttctatagcttcctagccacttctcagttattaagacttagtctagcccagtttagaacttcagtctcgtgtgagtcaaagctccctctctctacagcatgggctggagttgtaaccctaactttattgtaggggtgagatatggtctggctctgagataccgtcaatgttttactctttgagatgaataagctcttctggtttaaggaaatgtgggcggaatgaaggaatagggaagcagagctcttggtatagctggtctcatattgatgatgctgaacagtgctcctgctgtcactgtattccatccagttctggtctctgtccatgtagagcgatatccacctaagtgctgtgcatggtcctcggggtgtcagctttacccctgcaccctttatctttaatgactctttcagattgaggaagtcagatttttcttaagttctgcatctcctttctccggatgggtgtctcattacaggaaaccatgagaactcctccaactttttctccagtccctatgcaggggcttagagaatagggaagtaaattaccatcttgttcttcaaagccacactgtatcttagtatctttaagctgtgcctggctggccgcctcctccgtgggcttttcctcttcagaaatcaatttttcagaagagggtcccaatccctgtgttcacatatctttcaaacttcaggtgttatggtctaagttcttactaatcttgtttgactccatgacagcactaggtaggcctacaggttgtttccacccaggaagcatccaatcagggtggatgtcacgaccttccagtctctatcaatgggtctctaggagccactctcccttaattccagtgaggagaaagcacagagagaggagggtgtggtttctgtccatgagctctgcatttcccaacccctttgggggctgacaacaaacttcactagactgggttaagtatagaataaagtatattttaatagataaacatagggcaaggttgtggaattcagagaggcaaaaatgaacacagttgagaaatcgtagaacatgtttggagacaaagaaataggtcagtttggttgtggcataggaggtaataaaaatcaagtttcagtaagaacaatttctgacatatttttaatggccttgaatgctaggttgatgagctttgagttaatttaatttatgaagggttaagaagctaagatgctaagaatgtagctgtgaatgaaacagaggggcaaattcttacaagtttggatattgttgcctacattgtatttccaaagctttctggagtagtagcaagtgattctgaaagctctagaattctagctgtgtatctagtgttagttagagttacttcatttatagttatagagaggaatagttttcatttcagttatctggcacaaatggagtgtttttatcataaatttgtattactagcaatttctcagcttttggcagataaacttaataagacataccaatccatgataacctttacttagagttacagggaaaaacagtacattctttgtgtatggtaaacaactctttcctggtattgattcaatgtgggaagaactgtaacaacaaagcagcaatatgacattaaattcttgttgaccacattatctgttgtagatttaaaaaaacctgttttctgctaacagtcataacattttctaatattgttgggcaatagcattgcttgcttttgttatgatcactgttctagatactgtagttgtcatgacaacaaaataacactaataataacaacaatatataacatgtattgagctcttactatatgtcttccattttgtaaaacattttccatgggctcatttgagccccacaacaacttcatgaggaaggtactgagggaactgtggcatagggaggttaagctttttgactatgatcacatcacatgtaaaggtggagccaggatattgttcaggcagtctgaattcaattgctgggctcttcaacatgacagctatggctggggctgtacagaagtcaggattgacattgtgttatattcaaacatatgagcagattggatggctgtggccttcagatctttatttaatacaagttgatggggctacctctttctcttagcctctttccttgctgaaagtccctgaatccctttgtgattatagcagaatggatatctctaaagcgtggtgacctggtgagttgtcatgattttctgcagttctcagcagcctgtgagtggcacaactgaaatcattgtcctttcttcattgtcactcctaccttcatgtaagtgttgaacacatagagaactaagaagcagaaggtattaagggaaagtccggaaaggtggcagttctttagtatactatcatcatttgacatcaagccctgagcttggaacatttggaaactcagctttattagtacaataagagctcagcaagctcaggaagatgacttcatccaaattaaatgaatgggggagttaatgtattgattaattttgtgaattcataaatcgtaagcagatgactgggccaattgtttttggaacatttggaaactcagctttatcagtacaataaaagttgagcaagctcagcaagatgacttcatccaaattaaatgaatgggggagttaatgtattgattaattttgtgaattcattaattttttaatgaactatgaggtataatttttaaacaataagatggacccattttaagtgtacagctttatcattttttttttttgagacggagtcttgctctgtcaccaggatgatgtgcagtggcgtgatcttggctcactgcaacctccaccttctgggttcaagcagttctcccgcatcagcctcctgagtagctgagactacaggcatgtgccaccacgcatggctaatttttgtgtgtgtgtgttttagtagagacgggatttcaccatgttggccaggatggtctcgatctcttgacctcatgatctgtctgcctcagcctcctaaagtgttgggattacagctgtaagccaccacgcctggcccagcttgataaattttgacatatatgtctgtgaaatgtcaaccacaatcaacatgtaggcctttctattatcttaagagtctcttgtgccaacttctagtcacttcttatgccctactctcagcccaagcaaacactgatatgctatcaccatagattaatttttctttctaaagtttcatataaatggaataatatatactcttttgtggctggcctttcttattcaacaaaatgtttctgagattcattcatgttgtttcatgtactaatagttcattcatttatgttgctgacaatatgttattgcgttgatatatgacaaatcattcatccatttacctttgttgaacatttgaattctttccagttgccagctattatgaataaagctactctcaatatttgtgtaatagtcttattgtggatggaaggaagtttctatttctcttggtatatcagtcagggtccaatcaagagacaggaaccacaccatttaggaaatatttaatttaaaaatattattaaaatcacttaatagataataattattaatagaatactatcattagaccattggagtaatggaaaattggctattaagaggtaaagagaattctagagaacatgggattagcagaatagaaagaagcaaccactctatttgagagggcatgctcatggctcaatagatagtggggtatttctgtaaaatgtctcactaacaggactccactggctatttgccttcagaagtgcaaggggtaagtgttgatggacaggaactgtacttcagaactcactggagagatactcaaggaggggttgggaagctgttgaagtggaggtgccttacttgtcacactcactgggaggtgattgtctgggttaccaaggaaagctttttacccagagcaggttcacagtggcactccataaggatgcatcctaaaggggtttcaggggaagctgagaacagggaggtgccaggctagcagtactccattgggaagcatcctgaggaggtgttgaaagaaactggttaagtagagttgtccggccagtgacttttctctctgggtgccagtgtatgccattcaagggaatgtgtttaacaggtggcactggtggggatcccactctatgggcccgggaggaagcttccctgccagtggcactccactgcaaaactacctgagggaatgccaagggaagctggccatgagaacatgtcatatacttttagatactgggcactgcagaaaaagaaaaaaaacaacaacacaactgtgtgcattttgagagcctgatgcaagaaacataccagaaccagaacaagaacgccccttttctctattgtctttttggaaccctctgttacaaagggttgtgacacctggcaaagaataaatataggattcagttcgattattacagccagttattgcaaattggatatggaactaagagtcaataaattggtaactgacacacttggtaaatgcataggagcacagtcactgagtcatatgttatgtttgtatgtttctataagcaattgccaaactgctttccaaagcagttgcaccattcgcattcccaccagcaatacatgagtgtttcagttactccatatcatcaccaacgcttagtagtattgccctgcacttttttttttttttttttttttgagacagagtctctctctgttgcccaggctggagtgcaactgcaacctctgcctctcaggttcaagtgattctcctgcctcagcctcccaagtagctgggattacaggcgcctgccaccatgcccagctaatttttgtatttttagtagagatgaggtttcaccatgttggccaagctggtctcgaactcctgacctcaggtgatccacccacctcagcctcccaaagtgctgggattacaggggtgagcactgtgcccggcctgctctgtactttttgtagtgaatttgtagtgcatagtgtagaatggtgtagtgaacaatgaagttattgtagtgagtttgatgcaatatcactttgtggttttaattcacagtcctctgatggtgaaggatgtggatagttattttagttggccatttgtgtatctttttatgagaagtttctgttcaaatcttttgtccattacaaaagtgaattattggtttgtgttcttatagctgagtaagagtgtgtttgtgtgtatttgtgtgtatatgtgtgtttgcatgtgtgtgtatatatatatattctagatgtgggtgtacccccaaatatatgttacaaaagttttccctcagtctgtatcttgcctttgcattttgttcacaatgagtttcaaagagcagaattttaaaaacttgataaagtctaacatatttttaacactttgtgcttttctttcctatcgaagaaatctttacctaggtaacaaatattttctttcatgttttattctgtaagttttagtgtattagctttcacatttaggtctgtgatccatttcagattaattttttgtatgaagtgagataatacttgaggttcacatgtatgtgaatatgagtcctccccttaccccaagggatgctcaattgttctagcaacaattagctaaaaagtctttctatttcccattgaattagtttagatgctgtcaaaaatcaataggccgaatacgcttgatatgtttctggattctctaatttgtttcatgaacctatgttttatccttatgccagtaccatattgtcttgattacagcagctttatggtaaaatttgccatccaacagtttaagtcctcccaatatgtactttttcaaaacagtttttgctattttagcatttttttctttttttgcatttatatacacattttttctatatatatgttagaatcatataattaatatttacaaaagcatttgctgagattttgatttggattaagttgactctatagataaatttaaagagaactaacgtgaacaatcttagtcttatgattaatgaacattgtatgtttctctatttatttaggtctttctttccacagtgttttgtagctttcattgtacaagtacacatataaattgttaaatttatttgttaatcattcgtggtttatgatgctattttaaatggtatttaaacatttattttccaactatttgttgctagtatatagaaataagcttaatttttaaaatattgggattaaatcttgagtccttgttaaatatagttattgattctaaaaggtttcttctttctatttttttaaaggaggtctgtctttcttgtctgtatggtttttatctcttttctcaccttgctgctctagtgttgaatagaagtagtgagattggagttcttgtttttgttatccgatattgggggaaagcattctttcatcattaagtaggatgttagaagagtttttgatagatgcttcttctattgatagttttctgagagttttaaaatatgttttaatcaggaactctttttctgcatctactgagatgaatgtgttttaatatgttaatgcagtgaattacactgattgatttttgaatatgaaatcagccttacatctctaggataaatttttcttgattatggtatattatcccttttttgtttagtgctggattctatttccaagaacttttgaagattttatatctattttcatgaaagacatggatttgtagttttattggtttaatttgtctggttagactatcagggttatgctaaccttgtaaaatgaaatgagatttttttctctcatctccaggtttctaaaagattttatgtaggattggcattattttttacttaaatattagatagaattattcaataaagcaatccgagttcagaaacttttatggttcttgttcagatttgaataaagaattcaatatttaattgacataggagtattcataatgttttcaataaacctactttatttccatttatttttaactcctgtttttatctttttttccttctatctagttgagcttactttgctcttcttattctacaacattaatatgaaagcttacattattgattttggatctttgctcttttctgtcttgttttctaatttaaatccatgtctctcactgtaaacactgctttagctgtttatcacagaattttatatgttttactttcatttttattcagtttaatatgttttctaatctacatttacttggggatttccatgtgatttttttctattgatttctagtataactctgttgtggtcagatacatcttttgaatgattacagttcttttaaattaatcaagacttgtttatggtccatgctattatatctcttggtacacttttcatatacttgaagacaatttggattctactgtcattgggtgtacattttataaatgtcaattgggtaaatttattgataatgttaagaattatttatacttacagattgcctgtctgcttgttttttcaatcactgagagaagagtattgaattatccaattataattttacatttagctattttccttttcagttctgccagtttttgcctcttgttttttgaagttctgttattaggtgcatacaaatttataatttctatgccctcttgatcagttgactccattatcattgtgacatgcttctttttgtcctaattacattccttgtttcgaagtctaccttatctaatgttaaaaacagtattcttatgattacaatttttgtggtatatcttttttgtcatttccttataatgtatctataactttacattttaagtgggtttcttgtagacagcataaagttggatcctgctctttatttaaagaagtttgtcaatctctgcattttaattggagcatttaaacttttatctaatgttattatagatatatttcagttttaatctaccatatttctattaattttctatttgtctttcctcttttattctttttgtgacttcttttattttagttgtgtatttaaaaatattttgtgttattcttcattattagcttatgcattataacccttttttttttttatttttgagacggagtctcactctgtcgccaggctagagtccagtggcacaatctcgactcactgcaacctccacttctcaggttcaagtgattctcctgcctcagcctcctgagtagctgggactacaggcatgcaccaccacgcacagctaatttttgtatttttagtagagacggggttttaccatgttggccagaatggtctcaatctcttgacctcgtgatccgcccacctcagcctcccaaagcgctaggattacaggcatgagccaccgcgcctggctgatttacttttaagaagttgttctagggagctttgctcaatctgagtttgaaggcagaattaaactaataccctaaggcatctattgtatataatgaactattttctttcttatgtgcccaatatggagttatttattgaccatcctttggaaaataaataaaacagtcactcacatggttttctgtgcccagtggtccacatgagagcctagggttattatagatgatctaagaaagttggcaatatgcttatcatgtttaccttcaaataacattatacctcttcacacataagaaccccaacccacctatacttctacctgtcctctcctctccttttaaaagactgtatgttttgcttatatatatatgcaaatatatatatacatttattatatacataataaatgcatgttctttttttgctttaaatagtaaattttgttttaaagaaattaaaaattagaagcaatttattttatatttcctcatatgtttacaaattttcaagctcttcattctttttttgtggactcattttcattgattcttttctttctgtttgaagaactttctttaacgtatcctatagtgcatacccactggcattaaattctcccagccttttttttttctgaatgtgtttattttgctctcatttaaaaaatatattctctaggtataaaattctagattgtcagttttttcttcatcattttaaagtcatggctccaatgactgctgcacacatattggtgtctctgtaagtaatgtatcttatttttctctggatgcttttaagtatttatatttatcattaccctttggcaatttaaatatgaagtgtgtgatatacttttcttgtatttattccacttgagtttgctgaaattcttgcaagtaggtttatacttttcattaaatttattaaaattttagcttttgtaaaagtatttttccattttccccatctttcctctcctctggaactccatacctcctagttagacctcttagttttatgcttcaggtcattgagtttttgtttattgttttcctattttttctctctctgaactccatttggatattcttttttggatatgttttcaaatttactatttttaaattttcatttcatagtatctgatctgctcttaatatcatccaaagaaattgtttttcaaatattgttttttattgttagatatttcatttgattattttctacatttaatttctctctcatgtgtaaattttccttaatattaagaaatagttataatatctgcttttacattcttatttaagcagatattatattatattatattatattattctatcttttctgccatttcagggttggtttttattgactgatattttccctgggtaacatattttccagtttcttttccatttgtaatgatattttattagatattggaaattgtgaatgttacattgttgagtatcttgattttgttttgttcttttaaattatattgattatttttccccagctgttggttggttaactgcagcttagtttgatccttttgaagcttttaaagaagttttaatagaatgagtctcgagtagccctttttctagaggtagattagtcctactacttgcacagaacttctagatctttactgattactccaagtggtcaatgaggaatctctgctccatcagaactcaaatgtttcccatttctgggtgggctctaggaatagttgaactgacagccacctgattattccgtgttcaattttgtgtcatttcaccccgcataggtatgtcttaatattcagtggattcaagaagatttctgtaaatatttctggagcccccgctttttcctataactacctcttctctataactctactgcatatgttccagcctctggagtctgcttgaaatctgatctttgcgtccttgatttggtgaggactactgtgttctgcttgggatctattttccctctctgatgtacagaacgtggctctaggcagaaagccagggcaaacataaggctaacctcatttgcctgcagtcatagtgattgcagtcctgtatcatctctttttctaggtctgaaagtgtttttttgtatcttttcccagttttctttttgtttacagtgggagactacatgtgggctcattgtttcataactagatgcagaagtctcccaatttattaatttttgattgaagataaaactttttatgaccaaaatatgcctatctattgttttaggcactatctccctaataccacttgatggatgacattaataattgaaagatttactggtgaacatgcaatcaatgtgcaaggagatagagttttttaaattattttactttaagttctgggatacatgggcagaacgtgcaggtttgttacatgagtatacatgtgccatggtggtttgcggcacccatgaacccatcatctaggtttttgtcctaatgctcttcctctcttgccccacccccacaacaggccctggtgtgtcatgttcccctccctatgtccatgtgttctcattgttcaattcgcacttatgagtgagaatatgcagtgtttggttttctgttcttgtgttagtttgtgagaatgatggcctccagcttcatccatgtcccttcaaaggacatgaactcattcattgtatgactgcatagtattccatggtgtatatgtgccacattttctttatccagtctatcactggtgggcatttgggttggttgcaagtctttgctattgtaaatagtgctgcaataaacatatgtgtgcatgtgtctttatagtagaatgatttataatcctttgggtatatactcagtaaggggattgcttggtcaaatggtatttctagttcttgatccttgaggaatcaccacattgtcttccgcatggttgaactaacttacattccaaccaacagtcaatcaaaagcattgagatagagattcttaagcgtttgcttggcttggcctcaggaaagtcttaacactggcagtcccacagatatactccttccttcgaagtagccccacctcagtttaatgcaactgccttgtcagtggatagtgtcagatatcttggagttatccttgacttctgatcttgtctttgatggtacaattgaaattctgtcaattgtgtcatcaaaatagcatcttgtcccatttccattaccatcatgctggtgcctgttctagctccctaactgttttctctgggatttttcttacaacctgcacccacacctctccccagtttgatgttggcagagtagctaaaatactgctttaaaaatgtaagtcatatatagtaatgttctgttctaaactttaataattttttatcttacccagagtcaaaaccagattccttagaatagcctacaaggccctatacaaagtagtctcagttaatttctcttttcctggtactcattgcattccaggcatagtagtgcccttgatttttctcaaacacactaggcatgattccacctcaggaatgttttctgtgattccacctcttagcattactcttctctttacttttttatttttattttttagagccagggtcttgtagtttcaaaggtgactttaaataaaactttgctcatgttaagagaagcgatgtggatacctgatgcaaaaataaaaaacaaaccaggtgcagtggtgtgcacctgcagtcccagctactagggagcctgaggcaggtggctctcttgagcccaggagtttgaattcaggctggacaacatagcaagaccctgccttgtcacctattttttatcttgccttgaatgtattttttttcctgttttaatcattgtaacatctctgttgccaaaaacaccattgggcatacggtctaactccagatatatttgttggataagtgaatacttgaagtcagatatcttaatgactagttacttgtgccttctagactcagtatttctttgcctttggcaatgttgtacaagattccagattcctgatcttgactcctttttttttttttctctctagacttcacataggccaccatgttgccatgttctcttttttgcaggcaggttacataatacagatgactagcctggagctttcttttgtattcaaacatatatttctggctttgcacagttgttattttgtctgaacttcgaagttcccaaatagactcagggatctatctcttgtagtggcttatttctactgagaactaattttgtcatttgtggtttatttctgaaagtttcattctcaaatggcaacattaatttaaattccagggcaactcattgtagtccctaggaaccactttgaaagtgttaaaaatgagttcagttcagctgagaagatttaaattcatataatcagcgtttattccctgccacctccttattataaatggtggttaggtgtataggccaacccacaaaagcctattttattcacatgaagctgatctgtagttctaatactaccattgtacatacctgatttataatcttttttacacaagaaaatgtatcgaagttttaaacagccgtgatggctatttggctgcaagttccaacacattaatctacaaacatttttaaaacatagcttgatgacaagtttacatctacttggaaatatttcatcatcttggataaaatatgacattcgatgttgattaaatattgtatacagcaattggaaattagaaagtgttaagtagtcacatttagacttaattttatagttttttcatctatcttttatacaacattttggcccttcctttcagtctgtataccgtattttcctcttttctgtctatatcttctggttagtaaatcacatattgagactgactgttttagcatttaaaagtttagcaattttgttaaacaaaaagacagaaaatttactgctgaatggcaagggaccattctggtggcctttgttttgttttaatagggtggttgagagaaaaaaagatgcagttcagctctgaaccattctgtaatagaccattattaagagagatgggaagagggagccctttacttccatttcagagatgtttgcacttggaagtatatgaattcttatgttttcttcggagctgtttgaactttattatataatgtacacattggcatccaattattcaccttcagatatttgtgtgttgcccaaatattctagcacaaatgctagaagtgcctagcatttctcaaactgacacctatgggttccctggatctttgagaacttatttttggttatccatgagtacagtaataatgtttagattttctatttcattatataaaataattgatataagatattctagattatctagatgccccttttgcactggtttacatttacattggaacaaagtaaaggtcaattgatatcacaaaaactaatgcagagtttagtcttagtttaaattgagaaaatagttgggagaattgaacaagcataagactctggtacaaagatgtaaaatacaaaagaatatgcatcatgccacatttaccttttaggtgaatgtattgagtaattaggtagataccatctttgtataaattacaacacttctttcttttgttttgcaaagttatgaaaatattttcattaatgatattttaaaatttggtattcagttttgttgtagaaagatgtggaccgtcatataaaatgaacgattggtcgtcaaaagcgagcttgctgtaaaaaaaggaaaataacaaaaattaattaatggtcaatatatgctcaaaacaacaatgattagaccaatggtaactgacatacaatgtacaaatactgtagataaatacagctttccactaccatactcattgttggcaactatcttttagaaaaaaacattatatatcacattaaattaatgaagttaaattaattgcttgttaagaaatttctccactcttcttatttccctatagagagatacacattagaaaaacacctctgacatcttgccctacccctcgtttttgcccatgcaggagtagtgaattgtgtggttggaagatgaaaaccactgatctatgttctttgattgggtagagctaatctggtgaaacactgtaggcattatgaattaaaactctctctctgttttttaaaatttttctttaagttcttggatacatgtgcagaacatgcaggttagttacataggtatacatttgccatggtggtttgctgcacctatcaacctgtcatctaggttttaagctccacatgcattagctatttgtcataatactctccctcccctcaccgctcaccctctgacagctctggtgtgtgatgttcccctccctgtgtccatgtgttctcattgttcaactcccacttgtgagtgagaacatgcagtgtttagttttctgttcctgtgttagtttgctgagaaggatggtttccagcttgatcatgcccttgcaaaggacatgaactcatccttttttatggctgcatagtattccatggtgtacatgtgccacattttctttatccaatctatcactgatgggcatttgggttggttcgaagtctttgctattgtgaacagtgctgcaataaacatacgtgtgcatgtgtctttatagtagaatgatatataatcctttgggtatatacccagtaatgggattgctgggtcaaatggtatttctagttctagatccttgaggaattgccacactgtcttccacaatggttgaactaatttacactccctccaacaatgtaaaagctttcctatttctccacatcctctccagcacctgttgtttcctgactttttaatgatcactattgtaactgtcatgagatgttatctcattgtggttttgatttgcattcctctaatgaccagtgaagataagctctttttcatatgtttgttggctgcaaaaatgtcttcttttgagaaatgtctgttcatatccttcacccactttttgatggggacatttgtttttttcttgtaaatttgtttaaattctttgtagattctggatcttagccctttgtcagatggatagattgcaaaaattttctcccattctgtaggttgcctgttcagtctgatgatagtttcttttgctgtgcagaagtgttttagtttaattagatcccttttgtcaatgttgacttttgttgcaattgcttttggtgttttagtcttgaagtctttgcccttgcctaggtcctgaacggtattgcctaggttttcttctatggtttttatggtttggggttttacatttaaatctttaatccatcttgagttaatttttgtatgaggtataaggaaggagtgcagtttctctcttctgcatacagctagtgagttttctcagcaccatttattaaatagagaatcctttctccattgcttgtttttgccaggtttgttgatgatcagatggctgtagatgtgtggtgttatttctgaggtctcttttctgttccactggtctttatatctgttttggtaccagtaccatgctgttttggttactgtagccttgtagttagtttgaagtcaggtagtgtgatgcctctagctttgttctttttgcttaggattgtcttagctatacaggctcttttttggttccatacaaaatttaaagtagtttttttctaattctgcaatgaaggtcaatggtagcttgatgggaataggattctatctctaaattactttgggccataaggccattttcatgatattgatttttcctatccatgagagtggaatatttttccatttgtttgtgtcctcttttgtttcctggagcagtggtttgcagttcttcttgaagaggtccttcatatctcttgtaagttgtattcctaggtattttattctctttgtagcaattgtgaatgggagttcactcatgatttggctctctgcttgcctattattggtgcataagaatgcttatgatttttgcacattgatttttgtatcctgagatgtttctgatgttgcttatcagcttaaggagtttttgggctgaaatgatgggttttctaaatatagaataatgtcatctgcaaacagagactgtttgactaccccccttcctatttcaataagctttatttctttctcttgcttgattgacctgcccagaacttccaatactatattgaattgtagtggtgagagagggcatccttgtcttataccagttttcaaagggaatgcttccatcttttgcccattcagtatgatattggctatgggtttgtcataaatagctcttattattttgagatatgttccatcaatacctagtttatagagagtttttagcatgaaagggtgttgaattttattgcaggcttttcctgcatctattgagataataatatggtttttgttattatttctatttatgtgatggattacatttattgatttgcatatgttgaaccagccttgcatcctagggatgaagctgacttgatcgtggtagataagctttttgatgtgcaactggattcggtttgccagtattttattgaggatttttgcatcaatgttcatcagggatattggcctgaaattttctttttttgttgcgtttctgccaggttttgttatcagggtgatgctggcctcataaaatgagttagggaggagtccctctttttttgttgtttggaatagtttcagaaggaatggtactagctcctctttgtacctctggtagcatttagctgtgaatccgtctggtcctggacctttttttggttggtatgctattaattactgcctcaatttcagagcttgttattggtctattcagggattcggcttcttcctggtttaatcttgagagggtgtatgtgtccaggaattaatacatttcttctagattttctagtttatttgcatagaggtgtttatagtattctttgatggtagtttgtatttctgagggatcagtggtgatacatccttcatcattttttattgtgtctatttgattcttctctcttttcttattattctgtgtagtggtctatctattttgttaatgttttcaaaaaaccagctcctggattcattgattttttggagggtttttgtgtctctgtcttcttcagttctgtttgctcttccttctctagtttttttaattgtgatgttagggtgtcaatttcatatctttccagttttctgatgtgggcacatttagtgctataaatttccctcttaacactgctttagctgtgtctcagaggttctggtatgttgtctctttgttctcactgttttcaaataacttctttatttcttccttaatttcattatctacccagttgtcattcaggagcaggttgttcagtttccatgtagttgtgcagtttttttgtgagtttcttaatgctgagttctaatttgatggcactgtggtctgagagactgtatgttatgatttatgttctctagcatttgctgaggagtgctttacttccaattatatggttaattttagaataagtgcgatgtgttgctgagaagaatgtatattctgttgatttgggatggagagttctgtagatgtgtattagatatgcttcttccagagctgagttcaagtcctgaatatgcttgctaattttctgtcttgttgatctgtgtaatattgacagtggggtgttaaagtctcccactattattgtgtgggagtctaagtctctttgtaggtctctaagaacttgttttatgaatctgggtgctcctgtattcagtgcatgcatatttaggatagttagctcttcttgttgcattgatccctttaccattacgtaatgcgtttctttctcttttttgatctttgtcagttaaagtctgttttatcagagactaggattgcaacccctgcttttttggctttccatttgcttggtaaatattcctccttctctttattttgagcccatgtatgtctttgccacgaaatgggtctcctgaatgcagcacactgatgggtctttatccaatttgccagtctgtgtcttttaattggggcttttagcctatatacatttaagattaatattattatgtgtgaatttgagccccatatttcttggaggctttgttcattccctttcattctttttactgtaatcttgtctttataccttatttcagtaagttgatcttcaatctctgatattcttccttctgcttgatcaattcaggtattgatacttgtgtatgcttcacgaagttcttgtgctgtgtttttcagctccaccgagtcatttatgttcttctctaaactggttattctagttagcagttcctgtaaccttttatcaaagttcatagcttccttgccttgggttagaacatgctcctttagctcagaggagtttgttattacccaccttttgaagcctacttctgtcaattcttcaatctcattctccatccagttttgtgcccttgctggagaggagttgcgatcatttggagaagaggcattctggtttttggaattttcagcatttttgccctggtttttcctcatctttgttgatttatctacctttgatctttgaggctgatgacctttggatgggtttttgtgcgggggtcctttatgttgatgttgatgtttatgttgctttctgtttgttagtttttcttctaacagtcaggccccctcttctgcaggtctgctgcaatttgctgaagctccactccagaccctgttcacctgggtattaccagtggaggctgcagaacagtaaagattgctgcctgctccttactctggaagcttcatcccagaggggcaccagcctgatgccagctggaactctcctgtatgaagtgtctgtcgacccctgttgggaggtctctcccagttaggaggcacggggttcagggatccactctaggaggcagtcagtcccttagcagagctcaaacaccgtgctgggagaatccacctcatcagtatcagctgctctcctcagagcccacaggcaggaacgtttaagtccactgaagctgcgcccacaaccgccccttcccccaggagccatgtcccagggagatgggagttttatctataagcccctgtatggggctgctgcctttccttcagagatgcactgcccagtgaggaggaatctagagaggcagtctgcccacagctgctttgccatgctgtggtgagttctgcctagtccaaacctaccagcctccttagcactgtcaggggaaaaccgcctactcaagcctcagtaatggcggatgtccttccccacaccaagctctatggtcccaggtagacttcagagtgctgtgccgttagtgagaatttcaagccagtggttcttagctagatgggctctgtgggagtgggacccgctgagtgagaccacttggctccctgtcttcagccccctttccagggaagtgaattgctctgtcttgctggggttccaggtgcctctggggggtggcggggaggggaggggaggaacaaaactcctgcagctagcttagtgtctgcccaaacagctgcccagttttttgcttgaaacccagggccctggtggtgtaggcacatgaggtaatctcctgatctgcagattgcaaaaactatgggaaaagcgtgctaggtgggcccaatagcacagtccctcacggcttcctttggctgaggtagggaggtccctggctgtttgcatttcccaggtgaggcatgccccactctgcttctgctcttcctccgtgggctgcacccattgcctaaacagtcccaatgagatgaactgggtacctcagttggaaatgcagaaatcacgcaacttctttgttggtctccctgggagctcagactggagccgtttttattcggccatcttgccagatcctcctgaattcagtccctctctgatacagtctttctctctgtctccctctctccctccatcccaactccaccacccccactccttgaaactagtacaaagctctgatcctgtgtgaattgtagctgctctgtagacctaaactttctataagtaggctgtcccaagatttggactcggacaggttatcctcacaccaagccatgttcttcaacagctttatcagtatgaaagatgatattttgctctccacttgtctctttcatttgattagttccaatcttgggaaagggaggggttaatcattattgagcctctaaaactccaactttttttttattttgtaaatttgccttagttttatggttatatgggcactagatgcaaataattgtatttatttttatgttacataaatgtaagtacaattataatgaaaataatttaagccaacaccaaaaacccctgaacatgtttttcttttaatatgcatccatataacatgtaagtaggagaaaatttgaggcagcagaattgtcactaacacactcaaactcaatcaaaataaagattaaagcaatttccccagaaacttttaaaaaaataaagtcagcaacaacaacaattttacaatatggtaatgatgataagtggtttttgaatttccctgtattcaccacaaaaagtgaaaaagaaactttttttttgcttttagacaatatgtgtgacaaaactaactgacaaaatatgaatcctaaaatattactaggtcacgtaaagctaccaacagcaataatacctgcatcatagcaacctctagatatgactacccatttcctggaaagacaacagaggaacatgttatacctctctatagaaatgcagtcagcatattccagtcaatgggaagaaccctgctggagaaatggtatctttaacacataactaaaagagtaaaaaaggattgattagagagacttccagggaatattggcatattgagcagctgcaatgtatgactcatatttgaatcttgactaaaattataaaaattgtaagaaaagttagaaaacgtgaatataactgagtgtttgctttattaatcaaaactttttttgatgtgataatggtattgtggtgttttaacaaagaatttctaacttttagaggtgtttaatgaaatatttacatgtaaaataatatggtgccttgaaaggaggatataaaatgaggtatagatggaataagactgataacaagtaaataattattgaagctggattattgaggtacattatagtattctctttagtgtggaatatgtctgaaatttcctataataaaaattttaaaagccccttaggaacacaaagggacatttaaatgagacgataaggaccaaatgatggactattagacttcaaaaaaagtgttttcatagttcaaagaaaaggaagtccaaataagattttgaaatcctaggtatctagtaaaattatttccaattctgttcaaatattaggtgtccctaacaatctacaataacaggtaagagcaaagttatttcttttaactttggaatgtatttccttcttacagttaaaaaggcttatctgatagattgacaatttccctaaacatttatcaaatcatagctttacaatacgtgtggctgagaatgattcactttagcccttttgggagctggggcatctgagctcctgagctaagacttccagcctctagctgtgtgcagccttgtcttttttatcttaatgaactatacagatattgtcatttctaaatccctgttatgccctaaaaatgcatgggaagcactagactatactataaatctgacttgtgattccctctacttaggaactattctctatgccctacatcattgttcagaaggttagtgtcttttcccaaacagagatacacacttcagatagaagcagatgccaatctgtcaactaacatgtatttattgatttcccagacacagtgggaagggaagatacatacttgatcttaccatctgttctctctaaaaatccctttatttctccactggctttgatattacagagtcactagtgcactcgagagtctacggtcagttaatagacatttaatgagtggataacaaatatctgtctaagtgttggattctagagctcaagaggtaaatatgtaagacatggttcttgctatccttttcttagttctcagtctctttgctctcattgctaactttgacaccaatgaactctaccttgtagaaactttctaattcttaagtttccagatggctccctatgctctctctgctccaagctgattgcatcattctaaaaattcactgattgatgctgcctctgatgaaatataggcatttctatcatcatctctcatttatttaacagtattgatattactactatgttccgggctcagggaacccatccgtccagcaggagacagagactgctaaagactagtaaagtacaagaaagcgcaattaattgagagagttctgaaggacactgtctggtgctagggaggcacttcatagagaatgtgaaaattagccagagtttcaaaggatgacatactgagttgagttgacgttttatttccactgttcctccttcttccatatagctgggattagccatagagcattcacctatttattcattcattgaataaatacttatcaagcaccaactatgtgagagggactctgctaggcagattcagcaggtggatggtcaccaaactggcaaagggactgtatagcagggggcccccaacccccaggctgcagaccagtagtggtctgtggcctgttaggaattgggccacgcagccgcaggtgagctgtggctgagccagcgagcattaccgcctgaactctgcctcctgtcagatcagaggtggcattaggttttcataggagtgcaaaccctcttgttaactgtgcatgcgagggatctaggttgcacactttttatgagaatctaactaatgcctgatgatctgatgtggaacagtttcatcctgaaaccacctccctcccaccaccccgtctgtggaaaaattgtcttccacaaaactggtccctggtgtcaaaaaggttggggaccactgccctatagggaatacagataatctgggtcagtgacagggagtcactaatacaggatcagtccagacagaggaatgggaaatctagtctgattcttggaagatattgtatcctcaggaatttgtgacagttgtataatcagacaattttggaagtgtaggcatgtaatgcagttaaatcattgtccgtttcagatacaatctatcccatttacattagttcacatctcaaatatgttatcttgagcaaagttatccattctgtgtccttgtttccatatttgtaaaatgaaataaaggatagctaccctgtaagttcttgagggatattaaatataatttatatcattcaagaatttttgtcacctgaaagtgctcaataaatgcaattgtttaaagttatgggattttgaactaatattgttgtagcatttcctgaaaggatgaaacagcaaggtatgtgtgtatgtatcagtgtgtgtgtattatagacacaaggtgtacaagacttcacagactgtcacagaaagaattactttgtgaactactgatagtaattaatcatcatgaatttaaatattagttgtcagttctcaatgacaagaatagcattcaggagggttagaattccactctgtttttctgagagggaggctggatggtttgcgtacatttgttagtagctgagtaaaattcaccccttataatctgtgaggtgatctttgtattagtctatttgctttaatttttactgaccagagtgctcgaaaaagctgcacttattacttggctataccatgttttttttttttttttaaatggcacttttgtatcttttagtaggaaagatgaaatttcagtttattttggtttgtaacttgtaacttttttcatcaactaacagaaatcctctcataaggcaattatagcctttagtcattattgccataacttccactgctttcattagagatggtgaaaaatatgagtgtggttgtggaaagggtttgagaactaagacagctcacatatgtcataagattaattttagactagatattttttccattcaatgctcacttactttctccattttttacagtatcttgctaagatttaaaatatccaagagattttcacccagagagtattgtttcccaagagggttagttcttatgcatttatattctccaagctgaataaattgcagagctaggccaagaaatgtgtaaaaggtttgcataacctaaccatgtctccagaaataacatattcattcttagatgttatttttgtctttaaatcatgtctggatgctcacaacagcactattgagcataaagtgtatcatttctccagtctttcattaatcccccctttgcttccttgctaccagccaaaaaacaaaccaggaaacaaacacactaactaaaccaaaattttaaagaataggaaggccaaaaattactttctgcttaacatacatcaaaattattgaggtttttttgaggtctcattgtaaaaatgagataaaaacaaacaaattaatacctttccatctgtgtgcattgatggcactccttaataaaaagtctttgtgactaacaagaaaattagcaaaagagttataatacagtattcgtctttcaaatcaccaagaaccaaagtttttagtgagaagagggttacaaccttttttcccatgtgcattggatcctttaagtaaattatcagcagtacgacaaatatcttattattactatatgggtgtgaccaagcctgttcttgtttaatttagagctaagcaggatagagtatcagagagtatagtaatagatagcaacatgctgtgacttaggtaggtccaggtaatattagtagtaattttaatggtctaaaagctaggtagataagaatgagagtatctgagtcaagagagttagacaccaaattacaagtgccaaaattagaggaagaatcggtaagactgaagtctaagggcagcacttcagccccagggtatgatcaacattggaatcttgggcagaatatttagatccagggacaggggatgatgacagggacctagttaacagaaccggaattcaaggtagagatttgcttctaaggacaagatagatacttggctattagggtgagtcctagagtcagaatccttcaaatgatgatttaatttgatctatttgaagtatgctttaaatctcttcatgactaaggtcagaattgatccaggaccttggagtgctagagcagggcttgcaagtgagagttaagatgtaaacttttcccatttattcttcattccctagtgacacatagttcctttttctctaatctgaactagtctgttagtttaactgttgacttaacttacagcatggattaaagacaggaattctagtattaaacagatgcccttactagctttgggacccaggttagcttattcaacttctcgaagcctctgtttccttatctacaaaatgcaaataagaaaattatttcacagcattattgttagcattgatgtaaaacacttggcataatgcctggcacatagctaattagaatttgtactttatttttatttctaactaactaccagctatgaaaagaagacttcagttgcctgaaaggttgatacttaggcacaagttgacacacaactttccatcgtctgaccatgaattgtgcaggctgctccttctgcctctttcattgtgtctgtctgcctggctgacttgtgtgacagtcccataataattaccaataaaaatcatgtaataatgcttgccaagaagtataatacatgaaattctatctctagatgtctacttaatatattaatcaatttcacctaagctttgaatatgattttcaactcttgaatacaatataatatggagtgctttttttgatggatgtgattcttttgtgaaaacttaagcattgtaccaagaataagatgtgaatgtgtttttttaaagagtaggtgaagctaaaaattgtgctctaatggttactattttggtttcatgcatgattttatggcaaaaacctacataaattgtgtataagttattcaatttcttcctttgggcttatcaaactcacaggtttttccccaaatttatgtgtgcagatatagtcatatttcaggaaatgtgaagttttaaaaattttcttcctgactgctcaccaaattacttagattttttcctgaaatcattctcaggaaagtggtcacatttacgagtgataaaattacatgtgcaatttattgaataattgttaataattaatgacaaataatgaactgcagtcaggagacagattctggcctcaaataatttacagttcttaaaattatgagtagatacttctcggtagggtccatgtttcagttgacactgggctcactctgagaacaggaagtaatcagattacagtgatggtttaacgctatcttacttagaacttagatcaaagagttacagcagctttataatcctcagcactcaatgaatagattgccaaagtaaatctcagtttgtttaatgtctagtgaagcagaggaaaaagcagctattaagcatcacaatttttaaaggaggacagaatgacagtgttaatggatgtggaattttctctgtcctcagtcagcatgcttcattgaatacttatggaatgaaaagtacttggtgcaaactactgtacactaagcgttgtggtgggatataaaaaaggtataataaaggcatttgtgtaggacattgcaggtaaagaaaattctttcacatatatcatctcatgtgatattcacaacttccatgtgaggaaagaatatagaggttatcattttttcccactttactgataaaacgactgaggattttgagattaatgatttattcaatgacctgcagagctagcattggatccacatcttcatatgcaaataaatattcattcattcaaacatattaatctagggactactatgtgccgagtactggtgctatgccaaaacaaaaagcccctgcttttccagagctcatattccacacggggaggtaaaactataacaatttcaagtaaaaaatgctgggctgtggagggatggtgcagatgtaagtaaagcgtactgacaattcagaaaaggaagtccttttactctggcaagaaagatagggatgtctgctagattttgaagttgtgtgtagtgggagttcttcaaagggaagttgggactggctcaagcacaagatagaactcgggaagtaagatgagtaggggcagcaatgaaacgtgacgggaaagaaaggttggggattatgtcccaaagagccagatacatttgtttgaactttctgtggtagggatcactgaatatttttaggtatcagaatgatcaccagaaaataagaccaagatggtagagtgtgatatgtagatataaagtgtgagattggagacaagagccagttttttaaggaccagttggtttaaagcttttatcttctacaattatgttgtacaatgcagttattacaataatcatcacatactttcctcagttacttctttgaaatataaaaaagacatttaaaaatgtttgggaaattaatgaagaatttaataaaaagtaacccttttagttgagtatatggaatgaacaattctctggttaccaagatcattgtctaagaccaacattttatgaaaacgtggaattctacatatatgtgttagggcttgaaatatatttcataaatagaggtagagatttttaaaacaattctgattattttccttatctatagtttgttcaaacacattctttgaaagatttttttcggcttaggattgacttggtgatgcgggctcttttttggttccatatgaactttaaagtagttttttccaattctgtgaagaaagtcattggtagcttgatggggatggcattgaatctgtaaattaccttgggcagtatggccattttcacgatattgattcttcctacccatgagcacggaatgttcttccatttgtttgtatcctcttttatttccttgagcagtggtttgtagttctccttgaagaggtccttcacatcccttgtaagttagattcctaggtattttattctctttgaagcaattgtgaatgggagttcactcatgatttggctctctgtttgtctgttgttggtgtataagaatgcttgtgatttttgtacattgattttgtatcctgagactttgctgaagttgctgatcagcttaaggagattttgggctgagacaatggggttttctagatatacaatcatgtcgtctgcaaacagggagaatttgacttcctcttttcctaattgaataccctttatttctttctcctgcctaattgccctggccagaacttccaacactatgttgaataggagtggtgagagagggcatccctgtcttgtgccagttttcaaagaacaaagctggaggcatcacactacctgacttcaaactctactacaaggctacagtaaccaaaacagcacggtactggtaccaaaacagagatatagatcaatggaacagaacacagccctcagaaataacgccgcatacctacaactatctgatctttgacaaacctgagaaaaacaagcaatggggaaaggattccctatttaataaatggtgctgggaaaactggctagccatatgtagaaagctgaaactggatcccttccttacaccttatacaaaaatcaattcaagatggattaaagatttaaacgttagacctaaaaccataaaaaccctagaagaaaacctaggctaatattaccattcaggacataggcatgggcaaggacttcatgtccaaaacaccaaaagcaatggcaacaaaagccaaaattgacaaatgggatctaattaaaccaaagagcttctgcacagcaaaagaaactaccatcagagtgaacaggcaacctacaaaatgggagaaaattttcgcaacctactcatctgacaaagggctaatatccagaatctacaatgaactcaaacaaatgtacaagaaaaaaacaaacaaccccatcaaaaagtgggcgaaggacatgaacagaaacttctcaaaagaagacatttatgcagccaaaaaacacatgaaaaaatgctcatcatcactagccatcagagaaatgcaaatcaaaaccactatgagataccatctcacaccagttagaatggcaatcattaaaaagtcaggaaacaacaggtgctggagaggatgtggagaagtaggaacacttttacactgttggtgggactgtaaactagttcaaccattgtggaagtcagtgtggcgattcctcagggatctagaactagaaataccatttgacccagccatcccattactgggtatatacccaaatgactataaatcatgctgctataaagacacatgcacacatatgtttattgcggcattattcacaatagcaaagacttggaaccaacccaaatgtccaacaatgatagactggattaagaaaatgtggcacatatacaccatggaatactatgcagccataaaaaatgatgagttcatgtcctttgtagggacctggatgaaattggaaatcatcattctcagtaaactattgcaagaacaaaaaagcaaacaccgcatattctcactcataggtgggaactgaacaatgagatcacatggacacaggaaggggaacatcacactctggggactgtggtggggtggggggaggggggagggatagcattgggaggtatacctaatgttggatgacgagttattgggtgcagcgcaccagcatggtacatgtatacatatgtaactaacctgcacaatgtgcacatgtaccctaaaacttaaagtataattaaaaaaaaaatggggaaaaaaaaagaaagatttttttcttcatattgtactctcatcttcattcaattgctttatttattttcatggatagtcaaagtagttcaaaaattgatataaggttgtgggggcggaagtttttttagaatttaaagaacagtgcagatgaaaggagttttattacatatcctaaatcttaatttttagcctgaatcacttaataattactttataataatcaaattattttatattttctcactactcaccaatagattcacggtatgctttttattataaacatttctgtgtataatttaatgcttgtcaatacttacagaaattcaatgaactgaaatattgtccctaaaaagttgtcagtatctgtttttctggattgtaaagtttataaatatgatagcacacaatggagcaatacttaatattttgtcaaatagttaaaacaaatatatatatacatattacatgtacatacatacatatgtgtatgaagttttatttttagagttaaatttgttaaattagaaacataaaatggaaatattattgtatttagtagtaaatctttttatataggtgtcagtgagtgtttaaattcttcggagttctcattagtaaattatttaaattattggtggccagagttccccaaatatatggtctaacagctgttgattaataaattttcataatttatgacacattgtatgtatatagaattattaataactgttacttataatcatacaatatgaaatatttccgtggttggaaaatatagcctgaaagtgtgtttctgtccattttcaaattagtgtgatcattcataattgctacaaaaaaataaaatatctagaaatacaacttacaagggacgtgaagaaggacctcttcaaggagaactacaaaccactgctcaaggaattaagagaggacacaagcaaatggaaaaagagtccatgctcgtggataggatgaatcaatatcatgaaaatggccatactgcccaaagtaatttatagattgaatgcaatcaccaccatgctaccattgactttcttcacagaactagaaaaaaactgttttaaatttcatatggaaccaaaaaagagcctgtatagccaagacaatactaagcaaaaagaacagctggaggcatcatgctacctaacttcaaactatactacaaggctacagtaaccaaaacagcatggtactggtaccaaaacagacatatagaccaatgggacagaacagaggactcagaaataacaccacacatctaaaaccatctcatctttgacaaactttgacacaaacaagcaatgaggaaatgattctctatttaataaatggtgctgggggccgggtgcagtggctcacgcctgtaatcccagcactttgggaggctgagatgggcggatcatgaggtcaggagattgagaccatcctggctaacacggtgaaactccatctctactaaaaatacaaagaattagctgggcgtggtggcaggcgcctgtagtcccagctacttgggaggctgaggcaggagaatggcatgaccctgggaggcagagtttgcagtgagccaagatcatgccactgtaccccagcctgggcgatagagcaagactctgtctaaaaaataaataaataaataaataaataaataaataaataaatagtgctgggaaaactgactagtcatatgcagaaaatagaaactggacccattccttacaccctatacaaaaattaactcaagatggattaaagacttaaacataaaacctaaaaccataaaaaccctagaagaaaacctaggtaataccattcaggacataggcaagggcaaagatttcatgactaaaacaccaaaagcaattgcgacaaaagccaaaattgacaaatggcatctaattaaactaaagaggttctgcacagcaaaagaaactatcatcagagctaataggcagcctacagaatgggcaaaaatgtttgcaatctattcatctgagaaaggtccaatatccagaatctacaagtaaaataaacaaatttacaagaaaaaaaaaacaacctatcaaaaagtgggcaaaggatatgaacagacatttatcaaaagaagacatttatgcagccaacaaacatgaaaaaagctcattatcattggtcattagataaatgcaaatcaaaaccacagtgagataacatctcatgccagttagaatggtgaccattaaaaagtcaggaaacaacagatgctggagaggatgtggagaaataggaacacttttacattgttggagggagtgtaaattagttcaaccattatggaagacagtgtggcaattcctcaaggatctagaaccagaaatatcatttgacccagcaatcccattactgggtatgtacccaaaggattatatatcattctactataaagacacatgcacacttatgtttattgctgcactatttacaattgcaaatacttggaacccacccaaatgcccatcaatgttagactggataaagaaaatgtggcacatatacgtcatggaatactatgcagccataaaaaaggatgagttcatgtcctttgcagggacgtggatgaagctggaaactatcatcctcagcaaattaactcaggaacagaaaaccaaacactgcatgttctcactcatgagtgagagttgaacaatgagaacacatggacacagggaggggaacatcacacaccagagcctgttggggagtcgggggaaaggggagggagagcattaggacaaatacctaaggcatgtggggcttaaaacctagatgacaggttgataggtgcagcacaccactatggcacatgtatacctatgtaactaacctgcatgttaagcacatgtatccccaaagttaaagtaaaataaaaaaaattataaagacaatatgaaaacttttggaacatacttaaataatgagagtattttttgagtgctatgatgtgccaggtattatctaaagtctttacatagttatcttgatgtctactttatgcaaaattttattcccagtttagaaatgaagaaactgagacacagaaaggtcacaccctggtttcttccctccttttaccctctagactcccactggtgattttattggctgaactcaggagttagctgtcaggggtgcctgagatatgcagtagtcaaaattcttcctcccaggccataaaatacaaacccaaagcagggaagggaaaagagtgggtcccagggaaaacaggcccagaactaacagataactactgtgtagcaggtgcaggtatgtgctattttttttctgatatttataagattttgtatgaaattttacttggtcatttctttgttttaaaaatgttaagctcctgctaagtaattgtgactgaaatatatataaaataaacagaccagtagaagaagagacaagttcataaataaataacatataaaacataattctataaggtaaatatgtataaaatgtattatagaaaaatatgagaagagatttaatttggactggaggaatcagaagtctagaaaagctaagaaaaagaatgtgacgtgagctgggttttgaaagaaataggaaactagaacccagttaggtaggcatttaggcacaggctaaacataaataaaagcatgaaaactacaacgggaattgtatatcaggcacaatgacttgcctgtatagctgtagtacaaggaatatggaagaaagtggaaagataattgttcactgcatgagctcaaagtcatttatacatttgaactgtattcctaaccaaacttaagggctgtttacttcccagatttctgaagattggttgtatccatctttctcttctcattgtttgcacagaccagcatagtgttaatgctgttcttggtctatgtatcattccttcatcatataaggaccttggaattacaaaggaaaaatgcagttggcttgccttccccaaaacatctgtatttgctgcttcccaaaacattaatatgcatcatggttactacaagacttgcaaaggtgatgctgatgtgtctgtgtctggcttgttactgtttgtaccttcatttgctagatttgaagtctggccagggaaataatgtgggcaattgctcaagctatgctgcttcagcttccctttaatacctggtcaagagcagtctccagtgatgctgggtactctgaacacctctgctgcttcatgacgagtaaggactcagaatttagacaagggtgattcataccaggcctgagtaggtggccatcaatgtaatataaatcttttaaagtagaaaagtatttccatgcttatgctggtcatgctgctcactccttcagatccattctctgctgttctctgtgctgtaggaggttgatctctctaggacctcttgttatggtctgaatgtgggtgtccccacatcaacattcacatgctgaaatcctaatcctcaaggtgatggtattaggaggttggcctttgggagatgattaggtgatgaggatgcagcccttatgcatgagattaatgccttcataaaagtgaccccagagggacccctcgccccttctgctatatgaggacatggtgaaaaagcactatttgtgaatgaggacgggatccctcagcagacaccggatctaccagtgctttgatcttggacgtgccagccttcagaacagtgggaaataaatttgtgttgttaataagctacccagtctatggtattttattacagcaacctgagcagacaaagacagtgctcccttgatctttggactgcatttgatttttgcctatgggaagcagtaatagaagaagccagggaaaatgaagagtaattgaggtatttcttacctctctttctccttcctaggccacagtgtttgcagagcctattttcctttaattactgtgagataatgaggcgaccccctcattgctgacttcagcttttgtcagctttcagtagcactgtacctttccttgccctgcaggcctagggatggtaacaactcctcattgtgactagtccttgggtgcttcaccattccttgtcagtttccataaccctgcctgtacctctataaaatgtcccttcattcagtgctcttaaattaaatcctttgagtgcattctttgtttctcttctgcatgctagactacaccatgcagactcctcctttttcaggacagttggatggctcagatctctcaggaatttcccttagtcattttccctcaccaaagtcctgttcactttctgggcagcctgcattcagttactgatcattgtggaggtataaaaggcctggtttgcttggaccctggctggggcagccatggggttcattgtgactgttgttgagactgtggttggcaccaaaacctagcatctccgcctgccagacctgcttcctgtcctcacttccacagatgcagatcctgagagtactccctaataattttctggaatgcttacctcagtttcataatctacttcccagaaagagcaatttacaaacaccatttctttaaaagcacgtgtgctggctgattgttataaagattaattgtcttctcttgtctataattgccaatacgacccacaatgggcatagttttgcttttgtgccttctcagttccctttcctgggatcctttatggtcttatactcttatgctaatctgtactcttaaaaaattatctaaacacactaattaaagcaaccttaagttaccaatttatgcttgctaaatcagcaaacatttaaaaatattatagcctccagtattgttaaagttggtatggcacagatacatttatacagtgctaatggcattataaaccaaaataactcttgagaaagattgcatgacattatatatcattatgctatttgatctaataagtgctttcctgagaatttgttcttcaacaattaaaaggaagagcaaatctacctgtacaagttatcatctgttttgcaagaaaagaccaccactcaatatctgaaataaaatactgaatttattaatattttaagcaagggaaagccttgcttgtgaggctcagcctttctgagcaaagcatgaagctgattttatatgggtttttggcagtgtggagtccagaaatttgaagttcttctgagatgtcactgtttagtgattggctgacccttagttgtaggagcatggttaccagtgtgcatctgttgctgactttaaaaacgcaattactaaactgaagctgtttccaactggctgactttcagaattctgagctgtcactgactaggtttcagaaacatgtttattgaagtgaattgtcattgattgattatgtaaatttaaactcagctgggttgttacttattataatacctagcaaataactagtcttctcacagaagtgtaagaactttttttctcaacagcatattctctaatatgaacctggatataatctcaatgtctaatatgcaaatggttaagtaattatggtgaagacataatggaatattatgcagtcaataaccattattaatgttgcatagctgcatagtaaaagatttataatgtaagggtacatttaaaaaagattttaaatagaattttcttgtttatggcaactatttgaaaaatatgtgtgtgtgtgtgtgtgtgtgtgtgtacagggatcaattcatagaatgatgaataatgcttaatgttttacatgtttttatattttatatgtatatatgtgtgtgaacacaaacatgttttaaaataaagattaaaaaagcaatttaataattcaacagataacaggaaggtttgaattttagtaggagatgttgaagaccaatatgcctttaagacacaaatgaactcatctcattagaggccataaaagtggaagaagcactgaacttggaatttatgtcttcatttgaatctttcctgcatcacattattatttatctgaccttgggcgaaccatttgtcctttgtgagcttcatttgcccacctttaaaatatgactaacaatcatatgcttcataggttaagagaattagatgagactcctgttatgaaaatgctttgtcttggaaatgcgggctcttttttggttccatatgaactttaaagtagttttttccaattctgtgaagaaagtcattggtagcttgatggggatggcattgaatctataaattactttgggcagtatggccattttcacaatattgattcttcctacccatgagcatggaatgttcttccatttgtttgtatcctcttttatttcgctgagcagtggtttatagttctccttgaagaggtccctcacatcccttgtaagttagattcctaggtattttattctctttgaagcaattgtgaatgggagttcactcatgatttggctctctgtttgtctgttattggtgtataagaatgcttgtgatttttgtacattgattttgtatcctgagactttgctgaagttgcttatcaatttaaggagattttgggctgagacaatggggttttctagatatacaatcatgtcatctgcaaacagggagaatttgacttcctcttttcctaattgaataccctttatttctttctcctgcctaattgccctggccagaacttccaacactatgttgaataggagtggtgagagagggcatccctgtcttgtgccagttttcaaagggaatgcttccagtttgtgcccattcagtatgatattggctgtgggtttgtcataaatatctcttattattttgagatacgtcccatcaatacctaatttattgagagttttcagcatgaatggccgttgaattttgtcaaaggccttttctgcatctattgagataatcatgtggtttttgtctttggttctgtttatatgctggattacatttattgatgtgcgtgtgttgaaccagccttgcatcccagggatgaagcccacttgatcatggtggataagctttttgatgtgctgctggatttggtttgccagtattttattgaggatttttgcatcaatgttcatcaaggatattggtctaaaattctcttttttggttgtgtctctgccaggctttggtatcaggatgatgctggcctcataaaatgagttagggaggattccctcgttttctattgattggaatagtttcagaaggaatggtaccagctcctccttgtacctctggtagaatttggctgtgaatccatctggtcttgggctttttttggttggtaggctattaattattgcctcaatttgagagcctgttattggtctattcagggattcaagttcttcctggtttagtcctgggagggtgtatgtgtccaggaatcctaagccaaaagaacaaagctggaggcatcatgctacctgacttcaaactatactacaaggccatggtaaccaaaacagcatggtactggtaccaaaacagacatatagaccaatggaacagaacagagccctcagaaataataccacacatctacaaccatctgatctttgataaacctgacaaaaacaaggaatggggaaaggattccctatttaataaatggtgctgggaaaactggctagccatatgtagaaagctgaaactggatcccttccttacaccttatacaaaaattaattcaagatggattaaagacttgaatgttagacctaaaaccatgaaaaccctagaggaaaacctaggcaataccattcaggacataggcatgggcaaggacttcatgtctaaaacaccaaaagcaatggcaacaaaggccaaagttgacaaatgggatctaattaaactaaggagcttctgcacagcaaaagaaactaccatcagagtgaacaggcaacctacagaatgggagaaaagttttgcaatctactcatctaataaagggctaatatccagaatctacaaataactcaaataaatttacaagaaaaaaacaaacaaccccatcaaaaagtgggcaaaggagatgaacagacacttctcaaaagaggacatttatgcagccaacagacacatgaaaaaatgctcatcatcactggccatcagagaaatgcaaatcaaaaccacaatgaaataccatctcacaccagttagaatggtgatcattaaaaagtcaggaaacaacaggtgctggagaggatgtgaagaaataggaacacttttacactgttggtgggactgtaaactagctcaaccattgtggaagacagtgtggcgattcctcaagtatctagaactagaaataccatttgacccagccatcccattactgggtatatacccaaaggattataaatcatgctgctataaagacacatgcacacgtatgttttttgcagcactattcacaatagtaaagacttggaaccaacccaaatttccatcaatgatagactggattaagaaaatgtggcacatatacaccatggaatactatgaagccataaaaaaggatgagttcacgtcctttgtagggacatggatgaagccggaaacgatcattctcagcaaactatcacaagaacaaaaaaccaaacaccacatgttctcactcataggttggaattgaacaatgagaacacttggacacagggcggggaacatcacacactggggcctgttgtggggtgggggaagtggggagggaaagcattaggagatatacctaatgtaagtgatgagttaatgggtgcagcacaccaacatggcacatgtatacatatgtaacaaacctgcatgttgtgcacatgtaccctaaaacttaacgtataataataataataataataataataataataataataatagcatcccttgctgtgttaagaattctgtagatctgtgctggctaataagacagccactagccatatgtgactagtgagtacctaaaattcggccagtttgaattgaggtatgtgctctaagttgaagatacattctggatttcagagagttagtatgaaaaaaggaacataaaatatctcatcatttttgaatattaattacattttgaaatgacatttgtatatatttaattaaataaaatctattgttaaaacaaaaaaataaattgctgaatctatccaaaaaaaaagaaaatgctttgtaaactagaaaatattatacaaactattattttttcatctttcaattttctaattgtcataatatttgtatgtatttatggggtacatgtggtattttgttatatgcgctgactctaatgatcaagtcagagtatttggagtgtgtatcaccttgaatatgtattatttctatgtattaggaacatttcaagtactttcttctagctgttctgaaatatacaatacagtgttgttaactatagtcacactattctgctattgaacattagaacttattccttctatctaactctatgcctgtactcataaccaacctctttttatctccctacccatctacttacacacccttctcagcctctggtatctattattctactgtctacctacatgagaccaacttttggttcttacatgagtgagaatatgtgatatttgtctttctgtgcctggtatatttcacttaacataatgacctccatttccatccatgttgctgcaaatgacattatttcatttttatggctcagtagtattctatcatgtacgtataccacattttctcaatccatttgtttatagaagcttaggtggattccatatctttgctattgtgaacaatgcagcgataaacatgtaagtgcagcatcccttttatacacttatttattttccattggagaaatacctagtagtgggattgctaaattatatttttgttgtatttttagttgagaaatcttcatactgtttttcatagtgttttactaatttacattcccaccaacagtgtgtaagagttcacttttcttcacattctcaccagcatctgctattttttttgttttaatagtcgttcaactgggtaagattatatcacattgtggtttcgatgtacatttcccatttttccctccctccctccttccctccctctctccctcctttcctttccttccttccttccttccctccctccctccctttttctttctttctttctttctttctttctttctttctttctttctttctttctttctttcttttctttctttctttccttccttctttctttctttttctttctctctctctctttccctccctccctcccttccttccttcttttctttcattttctttctctctctctttccctccctccctcccttccttccttccttcttttctttctttttctttttcttctgttttttttttttttttttttttttacagggtctcactctttcaccctggctggagtacagtggtgcaatcttggctcactgcagcctctgcctcccagactccagagatcttcccaccttagcctccagagtagccaggactacaggtgcccaccagcatatttggctaatttttgtattttttgaagagatggggttttgccatgttgcccaggctggtctcaaacttctgatctcaagcaatccacctgcctcggcctcccaaaatgctgggattacaggcatgagccaccatgcccagcccagcacttattttcatatacctatttgccatttgtctgtcttcttttgagaaatgtcaatttatgtgcttgcccatttttcaatgagattttttttaacttgtttgagttccttctatatctggatattagtctcttattagatgaatagtttgcaaatagattattccagtcaacagattgtctgttcactaagttgattgttacctttgctgtgaagacacttttaaatttactgtagtctcatttgtctatttttgtttttgttgcccgtgcttttgaggtcttagccataaaatcttttctagacctatgtccagaagtgtttctcctttgttttcttctagcagtttttatagtttcaggtcttatgtataagtctttaatctaccctgagttgatttttgtatttggtgagagttaggggtctagtttcattcttctgcatgtggcgaccaattttcctagcaccatttattgaagagaatgttctttctccaatatatattcttgcttcctttgtcaaaaatcctttggttgaaaatacgtgaatttatttctgggtttgctactttgtcccgtggtgtatgtgtttgtttttatacaaaaaccatgctgttttagttatgacagtcttgtaatatattttgaagtcaggtaatgtggtgcctccagctttgtttcttttgcttaggattgctttggcagttcagactcttctttgttaacacatgaattttaggattgttttttctatttatgtgaaaaaatggcattgctattttgattggaattatattgaatctgcaaattgctttggacagtatggttattttgatgatttattcttttgattcatgagcaggggatgtctttccatttgtttgtgttatcctcaatttctttcgtcagtgttttgtagttttccttgcagagttctttcacttccttggttaaatttattcctaagtatttaattttattttttagctgttacaacttgtgttgccttcttgatttctttctcaactagtttattattaatgtatacaaacaatactgatttttgtatattgatattatatcatgaaactttactgaatttattaatttattagatctcagtttttttgtggagtctatagatttttttctagatattgaattacaccatctgcaaagaagggcaatttgacattctcattttcaatttcattcttttgcctgatggttctggctaggacttccaatactatgttgaataggagcagtgagagtgggcatccttgtcttgttccagcttttagagagaagactttcagctttccccattcagtatgacgttagctgtatctttgtggtatatggccctcattttgttgaggtatgtctcttctatgcctaatttcatgagggtttttatcatgaagggatgttgaattctatcacatgccttttctttgtctagtgacctaatgagatggttttgatccttcattcttttatgatgtatcacatttattgatttgcatatattgaatcatctttgcattcctgggataaatcccacttgatcatggtgtattatctttttgatgtactgttggttccaatttgctagtgttttgttgaggatttatgtttctctgttcctcaagaatattggcctgtagtgttgttgttgttttcatgtttttgtctagccttatagaatgagtaatggagaatttcaaactatattattaaggtatcagattcaatattaatactgtaggtaactcaaagctaattgctaaaaaaataaataaaatgaagttgtaattttttgaaacataaaatgcttcataatatgaagtatgtttggaattgaagccaaggaaaacacatgctgcttctcaaactatttgtcctttaatgaggtgccaaataactcaacatctgtctgagagttggtcatggcataaagggggataacttttctaatatactatgtggctgctgcttcattggggaaccttagaacagatgcactggcaatgtggtctacattgtacctttgctaacaagcttcctttgatttggagtcattgtgttcagtagacatcttaatggaaaagctacaattttgttcctatggaatacatgactattggtataaacagtaaatgtaatacacacttcttcctattgtgaggtgtccactggcttcacagtcctaccaaaggttaaacataccccaaaaccgaatcatgccaaggcaagctcaataattttaaagtccagcttttaaaaacttaagcagctaagtcactaatgaaaaaatatcctatctgtaccactgagatgagaaatttagaactgctagaactgctaatcttataattactaggagaattctgcaatttaaagcttgacaaatttttttttttttcctaactggcaaaatctagcattatctttgcttattttaaagttttaggttgattatttgacttaaatgaaatttaagataatttgccttatattggttttcattttcatggaaagaccatttctattacataccattcatatgtgagggtatgtgtgggtggctgagcacatcaggtttcatgtttattttaaatacagttaaaatctaaactgttctttcccctagaaactggggaattctggagattaatcagtggataaacagactttatagcagatgaatatatcattagtttcagttgagctttgcttactgtggtaacttgaatatccagatgaatttaatcaattaacaactagacattgtgacggattgaagtatacatgttcttaatctcaatgtactttcactctagctttggagacagaataaacaagttaaccaattaaataatacctgtagtcagctgcaatcagagttgtaggagggagagagtcccacgagagtggtggggtttaagctagtgtcaaagaatttggatacatggaggagagcagacaagcaaaagaaagaagagtatgcaggcgtctagaggagacataatatagaatatttacatatgttttgcaagtgaagtctgcagttctatatcctcagtttgaaaacacacacatatacacacacatacacacacagacacaactgcagaatgaacaacaaagggactgagatgaaacagctgctgtggtagttaggggcattggttctggggtgagactgcctggatttatgttccaacctttgtgattcgctctgtgactttgaagaactcacctacctgtactaagcctcagttgtttcataggtgaaatgggaatgactataatagtaccagatgaaaatgggaaaattgaaggagaaaaagtaattagaacaatgtccagtgtgtgattagatgtaagtaaaacttattatcatttgccatttgtggaaatgtgttcataattttgttacctgtggtgtattgctacaggacccttgagaccagaaacttcttttatttttaattaattagttaattcagcaatcagattttgaacattcatttataacaagtgctaaagatgagataagttgtctaatgacaggcatctgctctttgtacattttatatgattaatagttgttgaaataagggaaataattatcagcggttggaagtatatattgtcttaaaggttacttctttctttggtagttcaactagtactttttatagcccttataaagttatggtataattttttatataactatactgtataaatctttaggatctcattggtgtatcatcttgtggatgtctgtcccagtaaagaacttagactatcacatgtagtcaagctcattgttacaaaacatgcgcttcttattttaattacagaagtctaagtttaataaaaatgttgaatagattcaattcaatgtaatgaatgttagttatttcatttgtttgatatttcagtgctttaatggatttaatactaaaatgcttttttatttaatgaaaagcatggcagaattttattgcagtgcaaggtgcactgtactaatagtacttgacatctatataaattgttgtgttggattgaatgattagtattaaaaagaacataatatttttacttctcattgtgaaaaataaaatcagtcttttagaggtcaaataattattctagaagtcattaatagaattggatactgcccgagatgatccatgatgtcaggcccatgtgatctgataatctcctttatacttgttcttttctgaaataaagctgatctattaatctcatgtgtttttaatttaaattcatcaacttctgccttgatgtaagagaaaatcttataataggatttccccaaattttgattccttgcttttagaaacctagcaaagccatagattacagaattctagagctggaagagaagatattccctttattttataatcctctaattttactggtgaggaaactgaggcctgctgagttatcatacttgcttaagacaatagtcacaaaaccagactgaagctaatgttttctgtttccaggtatctatctacaaaccagagactcataatattgatagtaactaatttaagagcacacaacttaaatattttgacagggcttaccacaaatgagtcactattttaattgagtgaccttgtttaaatagatcaggatcttgttttactgttaaagggaatcaccaagcaaaacatgcctcaaaacctatttatgccttatagtcttgaaagtcatgatgtcttcagctccctaatatcagaacagtattttctaaaaagaaaattgtgaataacccttcacttagcttctctccacttaaaagcgtgtctgcatctgtacccaccctaaccccagtccctgcttctccctagggataattgtctacctgtgctataggtctctcttcttccacttcatcagttatccttttaccatcaaccactccctgtacatcagctctttcttctaaaaaatagacttattcaagtaatctcctacccacccgcccccaataaacaataaccttttattcatcttctgttgcatttcttctttgggcattactcccttctctttttttctacagagataaattccattaataaattatctacatttgctacttccattttattagctcaaattcactactcagacagtattttcacaaattttcataaattaaaaaagtacctattgaaaataaataaataaataaacattaccatgaaagtaaagcttgaaaataaaattcaatagaataattttttattgtaccccctaaaggaggaagaaatgaattgatgggtggtgattgtgaaagagaagtatctaggaggcattctttggaaggagtattctttctgcattgttttttccccaccagtctttggacattttagggactcatggttattgtctacttaaattgctcacaaagataaactcattagtggacttatttttaattaaaaatgaacatttcctaaatttatattaaaatgcaaagatctttgacttgctgaacagtttttaataagaaaaaacagagttggtgagcaaagcacatgagtagatatttctcaaaagaagactgacttacaaacagccaacaaacatgaaaaaatgctcaacatcactaatcatcagcgaaatgcaaattaaacccacaatgagatacgttactcctgcaagaagtacactttactctttactcctgcaagaatcgccataattaaaaaagaaagagatgttggcatggatgtggtgaaagggaatacttttatactgctcgtgggaatgtaaattagtgcaaccaccatggaagacagtatggagattccttaaagaactaaaaataaaactaccattcaatccagcagtcccactactggatatcaatctacccaaaggaaaagtaatcattatatgaaacatgcacacatgtttataacaggacaattttcagttgcaaagatatggaatcaacctaagtacccactgaacagtgactgtttaaagaaattgtggtatatatatgtataccatggaagactacccatccataagagggaatgaaataatgtgttttgcagcaacttggatggatctggaggccattattctaagtgaagtgactcaggaatggaagaccaaatatcgtatgttctcacttataagtgggagctaagctatgaggacacaaaggcataagagtgatataatggactttgggtacttgcaggggaagtttgggaggggggtaccagataaaagactacatattgggcacagtgtacactgcttgggtgatgggcgcactaaaatctcagaaatcaccactaaagaacttatccatgtaaccaaaaactacctgtaccccaaacaactgttgaaataaaaaaaaagaaaaaaacagagttagaggatttacactaagtgattttaagacaatattctattggcataaggatagacactaagatagagagtccagaaataattccatgcctataccagcaagtaattttctaagtaacttaaagaggaaaaaggtagtattttcaacaattaatgttggatgttatatgggaaaattaatttgtataataactcatgctatataaaaaaattaactcaaaatgaacatatacatatgaaacttaaatatataacttctagaaggaaatataggaacataatctatgaaatgatgggttgatcaaagatttcttagaacacaaaatgtcagaccatataaaattaataaattggaaaattctaaacctaaaaactttgctgtttaaaagacattgtgcagaaaataaaacgacatgtctcagccttgaaggaaatgtttacaaagcatatatcttgtaaataatttgttttcaaaacatgtaagcaactcttacaaaccagtagggagaaaaatcaccaaataaaattatgggggaaaagtcgaacatcatttcacaaaagaaaatatatgaatggaagataaacacatgaaaagatgctcaacattgttagttcttagggaaatgtaaatcaaaagcatagtgagatactactatactcccactagagtgggtaaaatgaacaaaaacaggaacaaaaaacctggtaatagtaagttttggcaaacgtgcaaagtgtctggaagtctcatacactgctgctgggaatgcaaagtagtttagccatgttgataattaacttggtagtttcttttaaagttgaatatacatttaccaaatgactcagaaatcgcagtcttagctacttacccaagacaaattaaaacatatgtctttaaaaatattgtactgtacttgaatgttcattgcaactttataaggtgtgaggggatggaatttatcacaaagaggcaaaatgatggaaaaattctgtgtcttagttttaacaatgttagagaactgtatacattactcagcttaaagtaggtgagtttcaataccatttttacttcaggtatgctgagaaaatgatacttcaggctgggtgcggtggctcacacctgtaataccagcactttggggggccgaaacaggtgaatcacctgaggtcaggagttcaagatcagcttggccaacatggtgaaaccccatctctactgaaaatatgaaaattagctgtgcatggtggcaggcacctgtaatctcagctactcaggaggctgaggcaggagaatcgcttgaacccgggttgcagaggttgcagtgagctgagatcacgccgctgcactctagcctgtgtgacagagtgagacactgtctcaaaaaaaaaaaaaaaaaaaaaagacacttcaaccacaggataaatatggggtctacatgaacattgaccgtgtttctcaccacacataaacattaattttatgttctgtcaaatagtaaaaatatactatttaccttctttaaataagtggatgaatgtcttgtaaaaattaggatggagatcattgcctaatttcccattaggcattaaaaatcatgaccagataataatgaaacaggagaagttacagatataaatcctggagaataaaggcaattttctctctattcagtattacttaacacagtattagatttaacatggtttacaaatgataataatgacagttgttttattgtcatctgggcaaagatgaaaaagaaaataataataataataataataataataataataatacttcaaattatttatagtaattccctaagaagtgaataggaagattttctgtaacctttgcattctatatttgaaggatgttggtatttgttttaaaaaatgatctacattccattttttatatatgcatgtgtgtgtgtgtatgtgttactagtctgttctcgcactgctaataaagacatacctgagactggataatttaaaaaagaaagaggtttaattggctcacagtttcacatggatggggagacctcacaatcatgatggaatgcaaatgaggagcaaagtcatgtcttacatggcagcaggcaagagagcttgtgtaagggaactcccctttataaagctatcagatctcatgagactaattcactatcactagaatagtgtgggaaagacccacccccatgactcaattgcctcccactgtgtccctcccatgacatatgggaattatggagctacagttcaacatgagatttgggtgaggacatggccaaaccatatcagtgtgtatatacacacacagtctgtgtaatgacagtctgagaaacagaagtaagcccaaaatctttctgtgatccaggcaatgttatttagctttatgataaaagagagaaatagttattggttcctattcaccaacactgagggagagtattatagactacatttgtggctggatagtaatttgtcagtatttgttgtttgctataatcattcatgattatatatagtctgaaagacttgggataaatgccatttaagaaattatattatttcttcatcttatgattcgtccttttgtggtgattgtaatgtttaccttgttagattcatcttgacctcctgtctggatccctggagactgtgaagcagttgttatattcttttgtaataagaaaatttaggcataaatagctcaaaagcagagttatgtaaggtattgttatttctattgtgttttttaaaaggaagtgaggttgaaagagggcattttgtggtgaaatgaagagcatgagacttaactgaaatggtgggattgtgattcagcaaagtatttaataaggacctactcacatgcaagactttgccaggcatcactcactgtttcatttaatcctcaaaataaccctgtcagatatataggatgcattatttctattttaataaataagaacacagtttcagaagcgtcaaataaattgctgaatgttccacagttactatggacagaattagaatttcaacccagagtttgtctgaatccaattgcagagaccttacctgtacacagatatataatgcattggcttgcatagaataaagtttatattggagaatcttcaaatgcctatcatcaatcctagaaatattaatgctcctgtcttcctaaaggcatgcaatacaatttcaacttttcttttagatttaggggtacatgtgcaggcttgttacttgggtaatactgaggtttggagtatgaatggttccatctctcaggcaataggtagtttttcagcccttgacccctttcttcttttctctctctagtattccccagtgtgtatttttcccaatgcttagctcccacttgtaagtgagagcgtgtgtatttggttttctattcttgtgttaatctgcttaggataatggcctccagctgcacccaagttgttgcaaaggacatgattttgttcttttttatgactgcatagtattccatgctgtacatataccacattttctttatccaatctaccattgatgggcacacaggttgatttcatagctttggtattgtgattaatgctatgattaaaatatgagtgcatgtgactttttgggagaatgatttattttcctttgggtatatgcccagtgatggaattgctgggtcaaaaggtagttctgttttaagttctttgagaaatgtccaaactgctttccacagtggctgaactaatttacattcccaccaacagtgtatataagccttcccttttctctacaatcttgcaatcatctgttactttttgacttttaagtaatagctattctggctggtgtgagatagtatctcattgtgattttgatttgcacatctctgatgattagtgatgttgagcatttattcatatgccttttggccacttatatgtcttttttgagaagtgtctcttcatgtcctttgcccatttttaatggggtcgttttttgcttgttgaattgtttgtttctaaagattctggatattatacctttgtcagtgcatactttgcaaatattttcttccattttgtggggtttctgtttactctgttgataggtttcttttctctgtgcagtatttctttagtttgattaggtcacacttgtcaaattttggttttattgcagttgtttttgaggacttagtcataaattctttgccaatgctaatgtcaagaagggtatttccccaccatcattcttcacagcattggaaaaaacaatcctaaaaatcatatggaaccaaaaaagaggctgcatagccaaagcaagactaagcaaaaataacaaatctggaggcaccacattacctgatttcaaactatactataaggccatagtcaccaaaacatcatggtactcgtataaaaataggcacacaggccaatggaacagaatagagaacccagaaataaaccaaaatacttacagacaactgatctctgacaaagcaaacaaaaacataaagtggagaaaggacacccttttcaacaaagggtgctgggataattggctagccaaatgtaggagaatgaaactggaacctcatctctcaccttatacaaaaatcaactcaagatggattaaggacttaaacctaagacctaaaactataaaaattctagaagataacattgtaaaaacccttctagacattggcttaggcaaggattttatgaccaagaactcaaaagcaaatgcaataaaaacaaagataaatagctggaacttaattaaactaaagagttttgcatggcaaaaggaacagtcagcagagtaaacagaaaacctgcagagtgggagaaaatcctcacaatctatacatctgtcagaagaataatatccagaatctacaacaaactcaaacaaatcagcaagaaaaaaacaaaaaaatcccatcaaaaagtgggctaaggacatgaagagacagttctcaaaagaatatgtacaattggccaacaaacatgtgaaaaaatgctcaacatcactattgatcaggaaaatgcaaattaaaaccacaatgtgataccacttcactcctacaagaatggccataataaaaaaaataaaaaataaatggtagatgttggtgttgatgcagtgaacggagaacacttctacactgctggtgggaatgtaaactagtgcaaccactatggaaaacagtgtggagattccttaaagaactaaaagtagaactactatttgctccagcaatcccactactgggtatctatccagaggaaaataagtcattatacaaaaaagatacttgcacatgcatgtttatagctgcacaattcgcaattgcaaaaacgtggaaccaacctcaatgcccatcaatcaactagtggataaagaaacgttacatatgtatatatatatatgtaatttatatatataatatatattatatatattccattttatatatatatataatggaatagtactcagccataaaaaggaatgaattaatggcatttgcagtgacctggacgacattggagacattattctaagtgaagtaactcaggaatggaaaaccaaacatcatacgttctcactcataagcgggagctaagctatgaggatgcaaaggcataagaatgacacaatggatttggggactcagggacaaagggtgggaagggggtgagggataaaagactacaaatagggtgcagtgtatgcagcttgatttatgggtgcaccaaaatctcacaaatcaccactaaagaacttacccatgtaaccaaacaccacctgttcccccaataacgtatggaaataaaaaaataaaaaagaagggtatttcctagattttcttctaggatttttatagtttgaggtttaatatttaaatatttaatcaaccttgagaaaatttttgtatgtgatgaaatgtaggggtccagtttcattcttcttcctatgggtagccagttacgccagcaccacttattgaatagggagtcctttaccattgcttatttttgttgactttgttgaagattagatggttgtagatgtgtggctttatttctggtttctctattctgttccattggtatatgtgtctgtttttgtttgggtaccatgttgttttagttactatagccttatagtatagtttgaagtcaggagctatgatacctccagctttgttcttgtttgggattgctttcactatctgggctctttttttaatttcacacgaattttagaatagttttattctaattctgtgaaaaatgatgttagtttgacaggaatagcactgaatttatagattgctttgggcattatgggcattttaatgatagtggtttctcaaatctatgagcatggaatgtttctccatttgtttgtgtcatctgtgatttctttcagcaatgttttagagttttccttctaaagatatttcacctccttggttaggtgtattcctaggtatgttacatttttgcatgactattgtgaatgagattacattcttgatttggctctcagattgaatgttattggtgtatagaaatgctactaatttttgtacactgatcttgtatcctgaaactttactgaagtcatttatgagttctaggaaccttttagtggagtccttagggttttctctgtatatactcatattgtcagcgaagatagacaatttgactttttttcctatttggataacttttatttctttcttttgcctgattgctctggctaggacttccagtacaatgttgaataagagtagtgagagtgggaatccttgtcttgcttctgttcttaaggggagtgcttccagcttttgcccattcagtatgctgttggctgtgggtttttcatacatggctcttattattttgagggtatgtttctttgatgcctaatatgttgagagttttttcatgaagggatgttggattttatttaaagctttttctgcatcattgaaatgattatatggtttttgttttcaattctgtttatgtgatgaatcacatttattgatttgcatattatgaattaaccttgcatcccaggaataaagcctactggatcatgatgaattaactttctgatgtgcttctgaattcagtttgctatattttgttgaagatttttgcatatatgttaattaggcatatttctgtagttttattgttgtgcctttgccagattttggtatcagggttatgttggcttcatagaatgaattagggagaagtgctcttcttgtacatttggtaaaatttgtctgtgagtccatctggcccagggctttttttgattggtaagttgttttattattactgattcaatttcaaaacttgatattggtctattcagagtttcaatttatttctgattcaattttgaatttgatattggtctgtttgaagtttcaatttctttctgattcaatcttgagaggttgtgtgtttctttgttaatttagctagtgttctattcatcttgtttatcttttcaaagaaacaatttttggtttctttggatggatttatgagtctcagtttcatttagttctgctctgatttgagttatgttttttcttctgatggctttgggattagtatgttcttatttttctagtccctctaggtgtcatcttagatcattgatttgagatctttttaacttcttggtttaggtgtttagcactataaacttttaacattgcttctgctgcatcccagagattttgtatgtgtctctattttcatttatttcaagaaatttttttacttctgccttaattttttttatttacccaaaagttattcaggagcaagttgtttaatttccatgtcattgtgtggttttgagagatcttcatggtattgacttttatttttattccaatgtggactgagagtatggtgggtatgatcttgattttcttgaacttattgagacttaatttatggatgagtctgtggttgatcttagagtagcatgcaatgttttaacactttcttatattgattatgtgttattgaagccatatcagaaatgtatgcaacaaataattgttttgccaatagaaatggaagattagaaggatcaaatgacttgttaatgatttcatagtcactaattgagctcttattggtagctaagtatcagtgataagaagttttgtttatgaatcaactactttccttcatcttcctgataaaattccacttaccttacaaaagcacagttcagatttactttcttgatgaagccttccctggtcctcctaggcagacttacataactttcctctaagttattgtcacaccttgtaaagcatctctgtcatataactgattgtatcagttgtgcattacgattgtgatgatactctacttagattcaacagtccttgaggacagaagtcatactgtttcatctatgattcctcaatgcctatacagtacacagccctcagtaatgctcaataaattgttgttggatacatgaatgaataaatgcccaagtacatgactatatgaattcataaataagattttggtgggtgcagaagtatattttttggttttagaatgctttccaatatataaataagcttttgctgaaacaaaaccaaaactaaacaaaacaaccctttaatttagagtctgcagatataggcactgtagtggaacaaactgtggaccaaaagccaagttatgcaaccaactaggtgaatgacaggtcagcttttatggatctctatattttatctgtaaaataagggaatcatggtatggcaaacattacaaaggtggtattttaataagtaaaagttgaaaatcactgctctaagacattttatggaagtgggtataataagcactactgtagtggttttcaagcttttctttttaagtggcagaacttcttgtcaagtaaaatcttacacagagttccagaatgtaaaatagttaaaaattagatgttgtagctgctaagtctctttgtcctctaatatttgttccttctggcctctcatttcctgcatatcaaatgtattaggtgcttgtcaaatttcatggatgagtccattcttagggcaaagcttaatttctcatctttaaaaataaatatagcctgggcaatatggcgaaacccatctctacaaaatatgcacacacacatgcacacacacacacacacacacacactagccaggtgtgggagtgtgcatctgtagtccctgctcatttgagaggctgatgtcggagaatctgttgagcccacgaggttgaggctgcagtgagccatggtcgtgcctgggcaatagagcaagagcctgtctcaaaataatttttaaaaaatttaaaaaaacaaaaataaataaggaaatgatagtttctaaatatgaagacacttaaagaccaataaaaatgtatttctatgttcctttatgttctatcaaaacaatattatgtggcattctagtattaccacatgagtttcagccttctgcttttgaaattgtttctgtttacatgcttatttttcgtatgtccacatagacctgaatcccctgacattttaatagagctgggacagacaggcccaaattggatgttgcttctaggtagggaatcactggcagacttcatatccaattatatttcagttaagccagtaaatattaggccattaattcatttgaagtcctggaaagatttctcacatttttgttatcttcctcttatgaagtctgtaatgatgtagtatttatatttctgagaaaggaatgcacagaaattttgtgtgcttgcttgcttaaaacaagaatgaactattgccctttgttgtttcagtggtcttcccaagaaaggaaaaaaagttacttgatgaagagtgtctggggtctttgagtctacatagaagacttacaccaaattactgtctgtgtcccatataccccatgaaacatgtttgaacagcactgtacaggtggacaattttttgaagtctagagacatagcacttgtgaatgaatgtcatgagtcttctgtattaacttaaaaaaaatttagtattggatcaaagtctaatttagaagaaaaaatacttggtgaattcttgttgaaacataagataaaacagagacaaattattatgctttttaagttatgttttagatatacagttttatacacacaatttacgttttccaatttaatgtaaattcctatgagattacatgaaagagtagctgttcataggctccatatgttctgccaactgcatatctctcctttatgtttcatcattaaaaaaatcttctgattcctttcttgttctgaaatactacttttattcccaattatcctgtttcttggccctgacccatcctatttgctgcttgttctctgataaacaatgcttatttgctgcttccaagtggcagcagacgtaatggttaatttcatgagctctgcaggcatagtgcctgggtgtgaatcctgtctctctgccttttcctagattagtgagcttagatgagtcattcaccctttctgggcctcagaattctcccctgcaaaatggagataaaaatagttgtgagaattacatgagatgatagatttagggactatagaatagtgcctgccataaagttattcatatctctgtcagaagagtaggaatatgtatcctgtcaatatagctgacatttgcagtttaccaggcattctgattctatttcctgccccctcctatctgctgcttttggattatcacactttcagggaatctagcaagaggcctcaagcctatctagtctactcattcaaacattttccagcaaatatttattgcttggcacaagagatatagtggttggcagtattctctatgagcttctgggaggcataaacctattcattcatacaaacaaatatgtaattgtgaaaaatactgtgaatagaaaaataatgtgataataccttcttacaggtaggggaagtccataaaggcttttctgaacaaatgacatcaaagctgaaggctgaagaatgggttagcccggcaaagttgaagacatgttatagtgtaggaaaagtttggagacaagaagggcatgctggatacactctacatccagtcgaactaaagctaaatgagttacaggggagagtgatgtggcataagcataaggtggggaagcaagtggaagcaaaaataggaagttgaggtttaaaagtcaagcagggaccagatctgtagggacttgtatgattaatcttcatattaagggttttgctttatcctaaaaattacagaaagcatgaagaatgcaaagctggggattaatataaggaattttgcatttttaaaagatcacactggagaatagagagagggggagtggaagggcttctctctttgtttcttagttacaatacctggaaaaggacagtagcctcctcaatgaagctttccttgataacattttgcccatagaggtggcttcactcattttttcacctaatgaacccatgatctgttgcacttctcacactgcactgtgaacctgacccaggccaaggtgttcagtattgtaggatgaataagcgttgattctcctctcctaagatgagacaggggcattttaaggccaaggactatgtatattcgtctttgtattatccacggcatctagcaagtccctaccacatgttgggctctcaatcttttgttgatgttgttgttgagaaatcagatgaaaagaagtggtttttcatgatggatggaaatgggggttttggatcatggatgcaatttaattttttatactctcattgaaagttggtaatattaattgaaatcctagagtggctgtttgataaatacctttgagggtagcattagaagatctaaatttgagcatgagcagatgcccagcaaatattaaatgaattgaatgtgtttcagccatacttgcctattacatctgtttgtagatcttctgtggtttattttaggagacggaaaaaattctctaatccatcctaaacctccactaatgccatcttcactttggcacagtgataactcagagatgaaaactctcaggtgtggagagagcttgcaataccaggttattaatagatttgaatacagggatttttttgttcttttccttttgtttaagatgaaacaaaaaatggctgaaatgaaagtgatttatatgcctctttatggtattttaaaccataagagattaatcagtgattacttttttttagactaggaaaaataattcaactctttaaaacttacccacttagtatatactgcagggaaattcactaacaaattcattgaggcattatttacacaagcagaaacatggggttagtttgtcactttctctctgttgtgttattgttgaacattagcattcagctcagcaaattgaatattaagaattctttctttttttgtcaccatgtgtattgatttcaaatgcatgccctattagtaatttacaaagaatgtattttatagtagaaattggtttaagtggttgttcaggagacatgttttactcaaagcagcatttagcctggctactttgccttttgatgattatttaaaaggatgccattatgtctttgttacttattgttctctcaggataagctaatggtttaagttcatattaatccctagcacttttcagtttttatctcaaaagtcattgatacttattacttaattgaaaaaactgattcttctctccaagcaatgtttgtgtctaaatattgagcaactttacaaataaaatgacctttcttattacatatacttttttcccctcaaatttacttgctctttattttttgcatcatacaacttcaaaaattttggggaggaagcacatttgcctctgtttatctccatcatattaaaataagaaagcagcaataactgagtgcagtagtcctgaatttctgaaagtgtgaagagagcagtagatgcaaattaagggggaaagtctaatattttatgtatcaaattctgatatgtttatctaattgttgagtctttagagttgttttttatagtttgtgtttatttctgctagttttctggaatttcattagtttcataaagtttacggatgattatactccaatccctttatttgacaattgaggaaaccgaagtcccagagctaagtggataactagagctaggtggatgtcggggctgggagtggagacagcagttcaggctctgctttatccggcatgtcttccttcagttcatagtacagtacatgctagcacaaaccagaaaaccttctttttcttgaactaaaccttgatgttagttttaaaagtcaagatcccatggtctagttttgaggttcttagacgtttatactttatgaattgataaaatttccaaagaattaggagacttacgtagaattgccaatttttagttttctcagttcagaacattaagaaacaaagcaaaaatacaccaatgcctcattatattattgtcatttcataaatggacattttctcatctaaaaggagatgagtaggacttttcctgttaagctagaaagggcaactgtaacccaaaacagtgaactaaaagccatcaaactatttcacgttctgtaaggatagacatacacaagggtggtctcgtacctcgctctgaggcagaggcagccagatgggttctgattctaatcctcatcctggcaacctctgaactctcatatacatagactctaggtggggagaggaggtgttggagaagtgcgttattggcctactgaaaatgaagaaccatttctagagacaagtgccttcaacaaaggacaggttaacttctgtatcccttaggctccagttaggaaaacaaaaggatttaatacaagcaatttgtcaattctcctggaagaataaagagggtctcctctctccaagtctcttctagtctcctaccagtgatttccattgtcagcacctaaaggaagccacctagaaagagaatctgttaaatatagtttgcgatgtagtctgcaatgtagtttgattcacatagcagaatttagaatgattggcttggggctgaaagacattggtaaataactgacagtatctcttctctccattgatcacttatggagaaggattttgtgcttttttgagaaggagaaagagaagtggagagatatagcaaggaacagagaagaaatagcagcaaagcagcctatacatttaggtgtatctatacatttagtatacatacatttagtgatatatatatttagtgtgacaaggatgcttgagcttattctggatcaagtggacattgcagcttgagccatcatgtcattattccaatcaagagagtagactatcgggcaaggggaccttaccaacaggagtttcaatgtgtgccagtgggggtggaactgaagttacttctccccagtgtgaaagctcctactgccccgttacaggaagggcctcatctcaacaccttccttagagaaggcgtcaaagtaagtctgattttaccagagaagcagagacactcaaaaaggactgcaattaaatgcttagttaagtaagaagacttttccctcttgtcattagttcttctactctgccacaatatagaaagagttagaacctgaagataaaaatagagaggaagaataaaagagtagtacattctttcttcccactccaagtcccagacactggccactgaattaaaacagttatacgatgggagttatggaagcaatctgaactgttgttaaggaggagagaatagatttgatattgcatatggaaaacagttattggagaaaaatgaagactagttcatatctgtgctctactgagttcagaatgttcaataaatcagttacataagaaatagaatgaaagctttttgaacatcatctgcaaaataaaagatattttttaaattggaaaaaaagtagtatttttaaactcaaaatattacttttgtttttctcatttctgcatggttttgtctagcatgtgtccatgatatagaattttaaaataattatcactattcactgaaattccttttagccaggtatcactagtactgataactctaacctgtgaaaggtgaaattcacacattaacacagaagtcagggtccttttcctcattttagcctttaaatatctgtggagaaaggggaaagaggaaaaggtgcaattatataaagaatattctagtgtgaataaaacagaacgttatgaaggactaatataaatttaaaagcatcttttaagtggtgaaatataaaaccacagggaaaactattaaacatatatcagaaatggaatctgtcatcacatttgtcaccttggaaatttttagaaagactttgttttaatgaagcatatggtgttttgcttattcagaagcaaattttataagggacagtaatctcagattaagagaacctgatctgtcctctcacttacaacatttgccttaaatatgaggcatttaaaaactttagtatcttttaatatcactcctttttgtccttacgctagtagggagcatggctccaggaaactgatcaccttaacttgtattaccaatatcagaaaaaaaagatataaagaccatttcacctagtttcaccttgaaaagatgtaaataagacccaatcagtggtacagtgataggttaatagtcttggttttagaacaagaatgttctggtcttaaccagtagagtgcatgcctttgggcaggcttcattactgttcccaagaaatgattccctcacttgtcttgataattgtgcctagctcatttggttggttgcttttatgacataattgaaatcatgtacgtagagtgcttaaaaatggctgaaggtaaatcctccatctctgttagcctaaacaaaaggcagcagaggttcctgaaaagaatctccattgtcatctgtgagtgaggacacaaaactatttttgccttacaaaaacaaattgagataatgcttgccgaccttttctcaaagtatcaaaaccaatctagatctccaagtaggttctactcatttattctttcaatacttatttattgagacttgcttgtgtcagtcactgtgctaggaactgaggggagatatttaacaattaccttctgactattgtaaagttttggaagcaagtctgtattagtcaggatcctagtaggaaatagattgttctcttaaagaagctgaaagagagtttaatggaggtactatttacaaagggtatgggcagggttgaggataaacaaaaagggctatgaaataccaggaggctagcaacaatgggaagctgcttccggttctacagctaaatagggaggcctgcaggatctgtgacctcaagtagaacgttttagccatggctacactatggccagcagagagggtcccctctttcctcctgccttctgatcttttgcaactgcctccattggctgaacatacccaggagccagagggctagacagtacctgagaaccagcctcccagggcacagaccagaatggagaagggccaagagtgggtctgaaggggcagatgaggaatatccagaaaacaatcaatctatatttcttgctttttttttgtcttatataacatatattgacttttttccctaaatataaaataatgtatttttattgtagaacatttggaaaactgccttgtaatttgtgatcctgctttttccgagtcaggacatgtgtccgattgaaggcacatgaatttatatagtaagttatcatactcaaaggatcataaaacaaatttatttccatggctaagaccttacaaaaatactcttgcttgtaaaaagacctactgatgttaccctggaccattttgtctctctgcctgttgtaagcttcctcatcatggcatctttctacatgtattgcactcttggcattcctttttatatttttgaacatcatattgttctacattttctccactaaagaaattcaactcacttagaaaaccttctataacccttattccattattatcattcttccattatcatcatttcacatagcatctttaatattttttatatgctcacaactttacagttataatcattgagtatgtatagttttatatcctgcgtttaaaacacatttaaatcttgcttttcttaaatttaggagtctgaactttttttttttcaggtttaaccctaactatagaggccctcaatattgactataaccctgataaaatatctcttgttgcttgtctacttttgctgggtttcaagcagcctttgagtaaaagtattaaaattctgcctgctgctgtttggtcagcattagaggggcatcgtagttctaatcattctttggtgtatgccgaggaaattcttgtcctttgcatattgaatcaaatacctgaaaagcccatggggttctctccctagagcacttataaaggcaaagtttctcccttcccccattctcttatctactttgtcagtttcactgccaactcctgcataatgtagtcaaattatgtgttagaaattcaaccctggtttcctgggtgatggtacaatgccactgcttagtattcctagtcacatagctacaatttcatcatgctgttaatctatatatatcttcatgctagagaagcagacttttttttaaataaggcatgcattaagggttaaatggacacagtgaaaaaaatatgtaggagtccttgagctcagcaacaatacaggatatttttggtactaagaccttgtgaaaccattatatggactaatacttcttggattttgtattttttatagtacatcttttttcagttaaattctgcaaacaccgaattctttgtattgtcttgtagtctgttgtatgacaactttatattttaaaaattttattttagacttagtgggtacatgtgcaggtttgttacatggatatattgagtaacgctgagatttgggcttccagtgaacccatcaacccaaatagtgaagacagtgcccaatagatactatttcaccttttacccccctcccactctcttccctttgagtcttcataaaccagtaactgctttgcctttggtttccacaatcagagtgcacccttaaattctggtagtgttatagaggttctttgtttctgcaatgacttccagtgatctacacaaagccaatgtcatgaactacagcatctctatctcaaaatagctagatttgtgtgacttaaaccaggaaattcaagctctaactaccggttgctagaattttctgtgataagtaattgcctactagtttatgcaatagacatatgagagatttaaactggtggtaaaaattaagattaaggtttttttctttcatgtatatatattctgtattggtttacttttcttcactttttttttgacagtataaagcagtcatattctttaaattctgaactcgtcatattttagctgtgttaccttggccaaataatttgttctctctgttcctttgtagaaaaagtgatgaaaataatctaacaaactgttgcaagcatcaaataaaatattttatgggaatatactttgtaaactataaaacatttgtgtaaaatgcatgttatttttagattcttcatgatcattatttgggagcctaattgttactcattattcttactatcttttcccaaatagctttgtaccaatttcttggatttttgtattaatattttgtgaagctcttttctcagcatatcaaacttaattggcttgggaaattatgatgtttgcttttacatgtacattgtacatatttcaaatgttaatttagagagtatgccacatatttttctttaaggatacagagctgttcttttttgtgtgtttttttctcctgtaggtattaaaaagtgtcagcaaactgcattgaataacagacatcctaagaggggatattttccacctctataatgaagaaaagcaggagtgtgatgacggtgatggctgatgatgtaagtttcaaaaggtcccaatcatgtttggtctgttcaataaagaagtcactggataattctattcaaagggcagctgggggcatttaacacaccactctgtgactaggtgtttctatgacatgggcacagccagcacctggacctgacgttctgtgagttggacagcaggaacaatgccctctttgcatcttggaaatgggctgagtttcacttttatggttttcaatcacagaaccaccaatctctagtctatgcccagatcctcactctcagataattcctctttccacactgcttgcattatcatcagttctctgataactttcttccacacttttacccatgtacagctaacccttgaaagtcacttcctgtggtggggtttttgacaactactcctaagaagcttgtgatacacacatcccctaggcctttgctactgaagtgtagtccttggactagcagtattagcattacctgggtgtttattgagaatgcagaatctcaggccacacctcagacctacaaatcagactatattttaatgggatagcagagtaaataggtatgtactttgtttgaaagccccgatctaaatcatctgaagaaatctgtaaactatcttctatagctttggatcttggtccttaattatctctttgctttcaattgaccaatccttcattagtgtgtctttaattgtctcatctttacccaattactgtttgtaattgaactaaaaattatgtgccgctgatcagatatgtgaaaggaaagaagggagggaagaagaaaaaacaattttccttgttttctgtaataatccatcttgttaagctcctgtttcacagatgctcaccctatgggccctgtggtccctttgcctcataccgtagcaaagcctttggcaagaatgctagaactaattctcagcttccttctgtgttcctgtaggacccacagtgcagagggagagttaggtgtgctatttagatttttccttcccaaatacactccttttccattgccatttctattttttgtgtcaaagaatctagttaatgtgttctgttctgtcacttgtggcagcatttacttcttcttcttcttcttttttttttttctttcttcctctctcctggaccagaagggcatttccttaagttatagtctaagttctcagtaccagcgttgctcaggatacctaaaagaaaacttctggaatttagaaaactttttttcttaaaaaaaaaaaaaaaggcttgtgattgtcccttaatactatttgtatactgtgtgcgccaatattttgttttttggaagaataaaactgagcaatgccttccatacggacaaaccattagttctttctcattgcatccttagaataataatcctgatcctccctgagggaatggtgggcatagtcaaaagaagaggaaggttgcctgcaagaagcatgcaatggatatgaacattaaccccaccatattgaataaatattacctagatttactctgtccactgtggtagccaccagccacatgtgactattaagtattagtctaaatggaaatgtgctgtaagcatgaaatacatcttggattttgaatatacagtgcaatacaaagcatttcattaataatttttgataatattacatgttgcaatggttatattttgcatatgcaagcctaagtaaaatatgttattaaactaaattttacctgtttctttttactttttaaatgtatctactagaaaatttaacattacacttttggttctcatttgcatttctaatcacagaaattatatgtgcaaatatattaggagattgtttcaaagaagggaaaatagtaagagcgataaaaattattccaacaaactactcttgtaattgatggtgactgcctacaatgaaatcagtttttgaagaaaaaattacttttattattgtctcatggagtatcatgacatttagcttcaatagggactctgactgtcatttgctgctttccataatttccatttctgatttcataagacttaaaaaattatgtcctgtggtccaaattgaatgtgtaccgaagcacagtaggagaccttaaaaataccttattccattttctcactatgagtttaaccaaaagaattcaaaaagtagagaatgcttcaaaaatgactgaaatagacaaaacaaaagacaagtaacaacagcaacaaaaccttgactacttaagcaccagcatttctcatctggacatttcaatggtcctaacttggttggtttcgatatggggatatgacaaacagctcagtcctttggtgtcccctccccctcctctctgtaaacttctacttaggtgcaggattttacactaccttttcctttgtgacaagcttttcaaattttattggcaagaatactgacttttaaacaaacagttattcagaaacagaaggataatccaaaactacgttgtttccttagggatttttcatattaccagggaattttggaaaccatgatacattttaaaagttgtgatttccagaggtaacattcaaattaatgttcctttctgcaaaatatttgaaaatttaggaaaggaagttcaagatcacaaatcagtaattgagaattgactaaattaaattttactttgaggtttttagtaattttagagtagtggtgtataaattatgggtatgaattacagagtgtgaagtaattatgaataaatctgcatgagttaattagtgtttgtaaaacaatattaagttttcatcttgaatttaatttctgaaaagctattccattatgttcttactttgtggcaatgcatttaatattaactgaggtcttctggaacaaatctttttaacttaaagaatatttcaaatttgaaaatttgagcttgtttgcaaattagtgtgggaaatattttgtgataggtgtgacttttttatttttcaaataacaagtgccaaatagtacccatttaggtcacttactacaattaaacctggatggtaatagttcttttttctaaagaagaaaaatatctaataatcatattaggaggttagggtggttggcggtttagctacatgatagatatccttatttctgttctttggtaaggtgtgtcttacataagagataaagtatatattcaagactttgctttccagataaccagtgctttctttacatgcatatttggaactagactgatttaccattatgatttcctttagtttattcttaaatctcttcaggaagattttatatattttgtctcctaaagaagtttgtaagtcttttaaaaaataaacatatatattagtttttccctttagcctctaatttacacacatagacacacacacacatgcacacacacatacacacacaacatacagtaagtgctaggcctacaatggatttgatataataactagttactagacagtgaaacactgatacattccagaatgtttcaaactctggaaaattttaaattgttttgtcttcttcctgatactgaactatgattctactgaatttcaaataaatagtattttaaaattataagtcaagcacaagaaaatataatggtgtctcattttctggtatggagggtggggctcctgaaaattctcaagcctgttcttgcctagatttctatcatcgaagtatagtcttgcatgcatcagataagtataaatcactagattatatgttctatgagaaaagataccattcctctttttgctattgtatccttaaatagcacagtgcaaaataataatagatgtgtgtcaaatatttgttgaattaacccagctagatcctcaaacttgagttaattatccttatatgaactaggataggggccgtggggtagaggagcggagggtaaagaactttgtttaaactttaggaggtctagtctcaggttctcctaactcgagtctgaagagctagtaggaaatacctgtctttagtgtcacagagtaattttcaggtgagagactgtagcctgatgctaggacttccgttattccctgctagctaagtgtgaacagtgaaaattgtaactttgaaaccttaagttgatatcagtgaccattgcagggctataacattttctgtcttttagctggtatgaatggtacaccaggcagaggctcatttgggcctcccactcccaacaatctcaggacccattgtcaccaaaagatatgggaagaataaataacttgtatcattgagtaccgcacaatgtctttgtcttctcacaaagtgtatgattaatgtcagcattagggcatgtacttgaacgtggcagttcaagactgaataaagtatacttctttttctgagttcttacacaatttgaaaaaaaaatctccaattgtaagaagacctttcataagaacataacagtcacctctaattatcaacattcagctgttctaagatagataatatttttactttaaaacactggatggctaggcgtagtggctcatgcctgtaatcccagcactttgggaggccgggacaggcagatcacctgaggtcaggagtttgagaccagcctggccaacatggcgaaaccccgtccctactaaaaatacaaaaattagccgggcgttgtggtgtgtgcctgtagtcctagctacttgggaggctgaggcaggagaatcacttaaacccaggaggaagtggttgcagtgagctgagatcactccagcctgggtgacagagcgagactccatctccaaaaataaataaatacataaaataaaatactgaacgagaaactttatattttctcatagtttgttcccatagttgcagaacgataacattgatttccaaaatatatttttgattttagcaaatatcattttagcaacttatgaaaaaaattaaaataggaaagaaggaggcctccaatccacatgctacaactagtaaacattatctatatgcctaaaaatctccaggaatatgcaactgataagtttattctaaaagctgagaatcagcctcttctattgttttctctttaagcttttgacatcgttgttagattctgattgtgagataatcaggacatcataagtgacagcttgatcatttagtttcttctttcactccatttaacatttgaatttcattttctttctcttctttttttctttccctgtggttcctccagaatgttaaagattattttgaatgtagcttgagtaaatcctacagttcttccagtaacacacttgggatcgacctctggagagggagaaggtgttgctcaggaaacttacagttaccaccactgtctcaaagacagagtgaaagggcaaggactcctgagggagatggtatttccaggccgaccacactgcctttgacaacgcttccaagcattgctattacaactgtaagccaggagtggtgagtagcctcaaaatcaaatgtcaattctaaatttttattttccaatttctccaaatacaatttcatagtattaaaatgtgagttttctgtgaaatacctaagatgattgacattttgagaattcgtttccctttagaatcaaagataaggtcttgtaaacagtggagatattttctagttcttcagagtggaaggaacatgcttcatttaaagctactgaggaaggaatgagatacatttacattaatgtaaagggataacaaaattactgcttatgatctaacttttttaaaaagagctatacagtgtgcatcagtattttttgacttagaaaaacaaattacatgttactatatgtatatgatgttcttattgctgaactctacacttctccctagcttctatttattatcatcctactttattaatctcagtttgtgattatctataaaataaaacatttcattgtaaattgaaagagtaatgaaaattgcgctatgagagatgctggcactgttgtgcagagtctatatttgtgaaagaggctattttaaaccagtgttgaaaagttaatcatataatcttacaattgtggttattgtgccatgactgcttcaaatatgtgctttattatatatttaataattagtacattctcacttttccttttctgttttcctacatcattttaaaatatttttcaggaaggattggcttacatatcatggaggtttatcatgaaagtgaaaaatattttctctgatatgattttaaattaataatgtgttgcttttaaaatcactttttgtttacataatttatcaagtgaaagactaagcattaaattattgtacaacattattgtagtaaattattaaaaatctattatttttatggtgtaccatgtacagagctctgccacatgctgagctctccagggctgatgagtagcccagtatgtgctctttgaataatgatatacggcatcttgacatcctttagtcaatgtttacctgacacactgagcattagatcactgaaactccaggtatcacagttaatagcatcaaatatttaatcagacaatctgtgtgatagagaatcatgctaaaacattttaaagaaaatgggttaaaaatttgagaaggactgtcttacatcttctgttcagctgaattaacattatataagagtcatagccaatcatggagaattaaaagggcacatagggctcccctataggatactcaatcacatagcttatgtgattagtcttgattatgtgtctgtataattacggatttggagtcttaaagatttccagatttatttttcagcaggttggcagtgatacaattctatcagttgttaaagtattgaaatgctttcataccagttggtaaatatatgctttcttgagctctctgattgcccctactactctcgcagactattctcctgaagcctctagaatttctcacaatctaaaaacaaagaggtgaagactggcacagaggaatctggttttggtgggtgttggtgctatatctgttgttagctattttgagtaacaccctgggtaaaatgtacagtgccttgtaaagtttgagttcatttaattcaaagacattttgggagttgtagaattgttccttccttagaaatatcaaatctagactctgccatttggggcatgcttgtttctctttcctagttgaatgtttttatttttaaaggagggcaataatatttacctcataggctattgtgaggattaaatgatgtaatctatctaaggtattttgcttagtaaaatgcatatggtaggtaatcagcaaatgttgatttttgtcctcttgatcattatccaataaatattttctggaaattagaaaccatgtctctagtatcagtagcctcattcttggcgtcagtattttaggttgaaatggaaaatttagccattattcatgttcaatagtcagtgagcaccacatattggtaattcatttataacatgtgtgttttatttcaattaacaggatactttttaaagtatgagaatagagtatgcagataactctgaatttattttaaaacataagtaactaaaagcatttctttttttttttttttttttttttttttgagacggagtctcgctctgtcgcccaggctggagtgcagtggcgggatctcggctcactgcaagctccgcctcccgggttcacgccattctcctgcctcagcctcccaagtagctgggactacaggcgcctgccactacgcccggctaattttttgtatttttagtagagacggggtttcaccgttttagccgggatggtctcgatctcctgacctcgtgatccgcccgcctcggcctcccaaagtgctgggattacaggtgtgagccaccgcgcccggccctaaaagcatttctgaacatctcttgaaaatccagcttccactggaatactgatagctgaagactggtggaattattggtgaaggaatctgattaaaaaatgatttgactagaagtgagggaactgggttcaaattatcatcaatgccatcaacttgatgaaagttcatagagataaggagtactgcctaggactacgtgagagaaagaattatgcttaccacttagagtaccaagaatatggaatcaatttccatgccaagaccagcaatgagcaaatgttttctctaaaggaccagatagtaaatattttaagttttatgagctttgcagtctctgtcacaactactcatccttgctgttatattgtgaaaggagccatagccaatgtgtaaacgaagaagtgtagctgtgttccaataaaactttgtttacaaaaacaagcagcaggctggatttggcctgccagagtttgccgactttgaaaagtctcccttagaaaagtttccctttctaggctagtaaagatctctaagacgtgatcctaggatttgatcattgtttttacagttatcaaggacaaaaactgactttgaggtcatggctgatgtgccaaataagtcataagtatgggactgtgtgttctagatcaagccatcaaagacagtgaaataatttgaatccgttctaatgaaaagtactgcctaattttatataaggttttatataaaaacattaacatgattttatcatatgtttatttggagaaaacaggccatcattacagaaaaaaggccgggaatataagaatagtgattttatttgtcatggagcaagaaagagttagaaaggactcaagcccagttttattgggtgacttccattttgtagcctttcagatgagtttctattataatacaatctccaaaagacacaaatgaacaaacaatggagattacaatacctacacttcaaaatcatgtggaaaattaaagaaaaggtttgctatgcatgtagcacaatcacttgttcttaatggttattttgatattattattattgtcatttttattgttacatttagactgagtagccaaaattatgcattttctattattggaggttttaggggaaacttagctcctgagttcttggaaccaacttggaaatatgatgaaagaggaattcagatatgaaagcaagatgttatctttaatactgataaagttgatactgaaaaatataatttatgtctgtgggcaagtgggttcctaatattgaaacctataattgcatagatgctagacctgggcaggatcccctcacctcttatacacacataaatagaaggcctacccctacaaaacttgtagcatggaggatctgtagaaatcctactcacgtgagaaagtagagggaaggattgaactgtacatggccagttcccccttatgaaaacaccaagaaagattaaattattcattctctctgggaaatagtgagtaaggcggcagaaagaggctggaaatgtgatgctggtggcattccagacacttgcaagacatatcaaacatttcccaatttttaaaatcttttcaccttaactttaggggcacattagggatgtgcctgttctttagaggaagatatcaggagtataccagtactaacttactgccatctttgtgaagctgttctcccaatattgaccactgcccttttgagtattccccccaaccccctcccccacaaaaatctgaattcaaagtttcctgctcttgtaaactgaagttcaaaaaatgaagttctcacatttatcttccatgtcttcttgattttctcattttgttagcaggaccttgaagcatggtttagaaggagggtttcctaaccagctgcagcctaagtcatcttccactgtaaaggctgtagtttcttcaggcccataggaattgtattcgtataataccaggtctctgagggacttcactttttaaatagttactgatctataggttatgcaatgctgcataaccaaatttagataataagccaattctgggccttgaacatctatagttaatctataactttaatcttcttacatgagggtcttagaacactttactctttcaagcccttccctgcttacagtttgtttttgtgtattttagttatttctctctctctgtatatcttaccacacaatacattagcattattttttgcattcaccgtttgatttggattttcccagatacttaccaatgttttggttttaattcctcctcatatcttagaacctctgctggaattatttgcctttttgcctgaagtaaattcttcagaatttatttcagtttgtctgaaaatgtctttactttatttcaacactttgaaactatttttccctgctttttgtcttctgttgttactattaggaaatcagctatcactctaattgtctttcttatagataatctgtcaattgttttttgtctctggatttgggcagttgaactttgatgtgcctaaggatggatttcctttcatttatcttatttgggatttcccggacttcttgaatatgtaaatttatatcttccttatcagatctggaatattctttcattacctcttcaaatattttctctgccaatctttctcctctgctgttggatttctgattaaatgtattttataaacttctttgtcttccatttctcttaatttattccacatttttttctcattttgtctttctgggctgcattctgataattgtttctaatctgccttccagtttgctaatttttttttttttttgagacggagtctcgctctgtcgcccaggctggagtgcagtggcgggatctcggctcactgcaagctccgcctcccgggttcacgccattctcctgcctcagcctcccaagtagctgggactacaggcgcccgccactacgcccggctaattttttgtatttttagtagagacggggtttcactgttttagccgggatggtctcgatctcctgacctcgtgatccgcccgcctcggcctcccaaagtgctgggattacaggcgtgagccaccgcgcccggccgctaatttttttttcaaactatgtctcatttgttattaaacctattatatttttttaattttgattattgtatttttacattttaaagtttgtattcatgtatttaaaaatacactagataatgttatgtggttttctattccctgctatctattactgcatagcaaataatcccaacatttactggcttaaaataacatttttatctcagagtttctatgaatcaggaatccagctgtggcttagctgtgtgcctctgactcagagtctctcacaagactggaatcaagtaattggccagtactgtagtcatgcatatgggtggaaaggtgggcagaactgcttccaacctgatcaacatggttgttgacaggctcaattcctggctgtggctgactagaaataccagttccttgccatgtgggtctcatagacctatgtgaaggctatttataacatgtcagtttggtttctccagagcaagtgttttgagaaagagagaccaatagagactgagcaagacagaggtcaaagtatttttacaacttagtcttagaagtgacatcccatcacttttatatattctgttcattaggtcttacacatgcacaggggaggggattctgcaaaggaataaacaaggaggtggagatcattggagatcagtttagaggctgtatattgcactgcagatattttcaagcttttagagagcaagaatagttattttacccttttgctcattttagtaactaaagttttcagtgagtctattttctattatctgtgtttcctgatagtttttgctcatgcttttaaaaaactttattaagaaaaatagctaatgcatgctgggcttaatacctaggtgatgggttgataggtgcagcaaaccaccatggcacatgttgtatgtaacaaacctgcacatcctgcacatgtaccccggaactgaaaattaaaaaaaattccttactactatttaaaaaaactttattaaagtacaatcagtgtgcaaaaaagtatacctatcataagagggcatgttgataaaatttcacaaattggacacaaccacaaaaccaggaacaaaatcaagaagcaaaactttactagtgtctcagaagctcttcttatgcaccccccgagcccctgccccatcactacctcctccatacctccaacaacatctattagttttgtctgtttttgaactttacataatggaatcacataatgtgtaatattttgcatttgacttatttattgccctcaacattaggtttaagaggtgtgcttaattttttaaaatttattgtgtgctgccacaataaattaaatgtcattgaaacattatttgtaggcacagtttaaggtatcagaataaggttcaccatagagaatttgcatttgattctatcaggtctctaggggcactggggcattggtagattgatcagagggtttctcaatcatctagctgaaacatgatcataatctgttaaggtccactgcctatgaccccacgccctcaacccctggccctgcttgaattatcactgaggctacccttctggcagtctcctggatgtagagtaggggtgtgtttacttctattttacctttgcaatgagaaaatagccctttgaagttctggtttaagttgggaagactctccttttgaatgcctcaccctggcatggctgggctttgattacagttcccccttgaccctcaaggacatcagactaatattaacttttactctgtgtggtaaatatcctcagggcaaaagcaactttgacgtccattatgcacctttggtgagaaaagtccccttacactttgacttgctatttccttactaacttggcatttctttagtagcatcaagaaaataagatgatagttttccttatttttaaagcaaaggttttgttgagataaccttgtgaacaatattacagaaaactttcatagctacttgctatggagatcttaggtcctttcatcccacacttgttttggctataaaattgcctttagtacattcttaaactgaagcttctgatgataattcttaagtttgtgctcctaagggcctactgggacctatttctttgactttttctcccgaagacactatctttccccagtatctgaatgtttttggctttgagtaaaatgtttgcttattttatgtagtagatattagtgtctttactgttttatctccctttcagaaaggaacatctgagtttgcaatagtttaaactgaatcttgttttactgtcttttcttcctttgtacttgtaggcctacatagaattgattacttcacttcttttgctttctcttgctacttgatctaggtattgttaattatccacggatgaggataaataacaaatacacacacacacacacaccccttaggcatatcatattcaaacttcagaaaaccaaagacaaagaaaaatctctaaagaaatcaaataataaaaacagacatatagaggaacaagaataagaattatactggactgtttgtcagaaaccatgaaagcaagaagagagtggagtacattatttaaagtgttgaaataaaaactttcaccaggctagaattttataaccagcaaaattatccttcaaatgtgaaggagagagggagactttttcagagaaacaaaactgaggaaactcattgtcagtagacctgatttataagaccatgttaaaagaagttattcattaagaagaaaaatgatatagggcacagatctacacaaagaagagtgtcagaggagaaataaatgaagataagataacattgtttagttttttcaagctaaactttcttaactatataaaacataactgtttcaagcaataccaacaatgcactgggtggttatagtataggggtaagggaaatgaaagacaacagtgtgaaatgaacaagcaggagcaaatgggaatattctgttttaagatatatatactacatgtgaaggcagacttaggttacttaaaatataaatatgtattatatataatatatgtaaatatatataatatgtattatatatataatatatgtaaatatatataatatgtattatatatataatatatgtaaatatatataatatatattatctttatcacatctggtacagcagctgcaattggagtcatcactttgttaaacttatgataaggcactgtcattctccaagatccatctgtcttctgcacagccaaatgggagagttgaatgggaataaccactcgtgcttctttcaagtccttgatagtggcactaatctccacagtccctccagggatgcgatattgtttttgatttactatttttctaggtagaggcagctctaatggcttccatttggcctttctcaccgtaacagccctcaccctaccagtcagggagccaatgtgggggttctgccagttgctaagaatgtctatgcctattatgcactggggaaatgaccacaggatgagtccgggaacccactggatccactctttgttggacctgagctacaactccattaattacctgacctccataagcccctgctttaactggaggaccacagtgacattttgggtcctctggaatcaatgtcagctcagagccagtgtccactagttccttaaatgtcgatcatttccctctccccagtgggcaggtaccctggtaaaaggctggaggtctccttggggaaggatgggagaaagattcactgctcaaattgtcgataacgtagtgaggtccttcctcaagggtacctggcctccccttcattcaaggagttctgggtctgtaaactggctcaagtctggaaatcgattgaggggccattattctctgtttttataatttaaattagtcttttgtccattcgacctagaagttttctgctagtataaattaagtacgaatgcagtaggcttcctatcaatttcacttctaggaacaccgtgattaattagccaatgccataactctacacgagtcagaccattctgattgccactttgcctctgctgtccaataaggtagctacgcccaccttgcctttgaaggttgagtgccaccacttggctcctgccacctcaggatctaattactcccattgtatttaaattttgtggttgagtgactgcagttcccactgttagatctgacatacagagaagagcaattacagggctcttcaaagatgcaggtgccaccctcgcaaatctattttgcaaggcattggtcaagggtgtatcttctggaccctcccagctgggatgagaggtctaaagtgactaatccactccatcatcccaatctccctaagcctctggatcccttcctctccattaaaccaagggagatcaggcatttccagcttgcttacagtgggccatcttttagtccatatttcagctaaccaagcaaataaactattagaacattttttaactcaccaagctgcaacattagaagcagagttcctatgtagtgggcccaaattaataaattcggcctgatccaactctgtattccttccaccattatcccacacccttaatatccattcccatgttcttcagatttctgtttatataaatgagaaaactcaagcagttcttttccagtgtagcgcacctcctcatgggtcacactctcaaccttacttctaggggcccgccgggactttagtctagttataggtctagaagcaaacaggcaggttgggggtggctcctgaggagaatcagcattaccttgcctggcaaccacctcaggggaggccatcactgttgcctcaggcggcacagggtttatctcttcagacaaaggtagaaaggctgatggcagcatgggtcggggaggggatgttgccactactggggatggggaagctgttccttctggcaaaaaagattcatcagagtttacaaattcagtatccccagcttcatcagtgtcttcccacatgttcctgttccaagttgcagggtcccattcttttccaatcaatctcactttaatagacacctggtgaggctgtgcatgcaccttctgttgcaggtcacccactttcatgataagagtttgtgcctgtttttccataattcccgctctttctctataggaaataagactttcacttagggcaatcttaacagacttgaggttcagtatttgcttctgaagccaggagacagaatccatgagtttatcattttctttcatcactttgtccactgaacttaggcgcaaccaatcagcttcattacgttccttggttctgcacatatggtcaaaggtattatgtatagagtcactaaactccttgcctctcatgagtggtgaattgggagtgtcaaatgcatttattttgtataactctctaaacaatccatgccaaggactatcagtgttctccatactattagaagtagaatccttagcatttttgagtctaatcatattaagcagccaactccagaaactcccaaactaatgaaagaactccattcttaaaatactgttcctctagaaccattcttggtaccaaaatctatatttgccagagttctctagagggacagaactactaggatacaaagtcccacaataagctgtctttaagcttgagaagcaaggagagtgagtctgagtctcaaaactgaagaacttggagtccaatgtttgagggcaggaagcatccagcatgggagaaagatataggctgggagactaggccagtctctccttttcacgtttttctgcctgccttatatttgctggcagttcattagattgtgcccaccagattaagggtgaatcctctttcccgagcccactgactcaaatgttaatctcctttggcaacaccctcacagacatgcccaggatcaatactttgcatccttcagttcaatcaagttgacactcagtattaaccatcacagagggccactgttctccagactccagaatgatagatccactggcagcttgtaccctgcacctggaaaagctacaggcattcaatgccagcccttgagagcagcattggggggtcgagccctggaaggccacaggggcggagctgcccaaggccttgggagcccagcccttacatcagtgtgccctggatgtgggacatggagtcaaaagagattattgtggagctatacaatttaatgaccaccctgctgggttttggacttgcatagggcctgtagccctgttcttttggctgatttctctcttttggaatggaagtatttacccaatgactatacccccattgtatcttggaggtaactaacttgttttttattttacaggctcataggcagaagggactagccttgtctcagatgagactttggactgtggagttttgagttaatgctggaatgaattaagactttgggaaactgttgggaaggcatgattgtattttgcagtgtgagaaggacatgagatttgggagggcccaggggcagaatgatgtggtttgaatctgtgtcctcactcaaatctcatgttcaattgtaatccccaatgttggaagtgggacctggtgggaggtgattggatcatgggggcactttcacatgaatggcttagcaccatcccctcagtgctgtcctcatgataatgagtgagtgagttattgtgagatatggttatttagaaatgtgtagcacctctcccctctctctcttcttcctgctccacccatgtaagatctaactgcctcctcttttccttccaccatgattgtaagtttcctgagacttccctagaagcagaagcagctatgcttcctgtacagcctgcagaacaatgagcgaattaaacctcttttctttataaattacccagtcttgggtattcctttatagcaatacgagaatggcctaatacaaaaaggtatacagtttgggagagaggaaataaaattatctttgcagatgacatgactgtctttacaaaatatcctacagactggcagaaacaaacaaacaaacaagaaacacctctccttgaaggaaataataatcaatataacaaggtttcagtatacagagttaacatacaaaatcagttgctttcctatacactggcaatagacaattgaaatttgaaattataataataaaatgtcatttacagaagtgataccctccttcccccaacgaacccaccaattcaacaacaactcacagacaaattctcttactgagaaatccaaaactagttgagagcctcctgcacccagacacatcaaatcccacaggaaaattcaggacaccctcatgtctgaatccctacccacagctcaatgccacatgattgaaaggaatcatagctcccagcttctccctggagagtaaaagagttggaccatgtgtatgacactcttccaacttcttcctccccaaaggatgggcctttctctttccagtcttggagcagtaatggaacccagcataatctagccatccaggggctggtaagaacaaagacagaagtttgcactgacagttaccatatcctttccctcagctcaacacagagcaagaaaatgaaaaatccctgcttccaacatcttcttgggaagggaagagttagtctgcttggccaatgccccagtgtttctgggagcttcccaaaggacttcctctgtctggcttgttttggggtacttatgggacctggcatactctagctgccttggggccaatgagaacaaatatggtggtttgatctagcatgcaactagatgatgcagtcccacccacaagctcagtgtagggtgaacaggtgaaaaaccacagatcccagcttctctctctgtgtgtcatgggaagagttggaaagggcatcaaatgattcaacttttctgggggctacttgaggaatggccccaatatcacttctattggaacactgattgtacctagcatactctagatggtagctgctaagaacaaagaaaacagattggcaggttggagaggccccgagaatccatggctgagctggttagtgagggtcttctcctttataagtttagtctgtgaagattgggagaggtcactgttttgtctaatataccaaccctacacaaagagtcaaggaaaataaaaataacatggaaatggattccaaacaaaggaacaagataaatctccagaaacaaagcctaatgaaagagaaatatttgatttacctaacagagaactcaaaataaccattatgaagatgttcaccaaaaccaagagaacaatgcatgaacatgagtatttcaacagagatatagaaagtataaaaagtaccaaaaagaatttgtagagctaaataatacaataacagctcaaaaattcactaaagcagtgtgacagcagactaaatcaagcagaagaaaagataagcacacttgaagacaagttattgttgttagaaattattcagtcagaagagcaaaaagaaaaacgaatgacaaaaataaagacagcttaaaggacttatgggacaccatcaagtggaccaatgtgcacattataggagttcttggaggagagaggagagagagaaagaaccacaaaacatattcaaagaaataatagcacaaaacttcccaaatctggggaagaaaatgcacattctactctaggaagcccagcagataccagatgaaatgaacggaaagaaacctacactgagatacattataattatattgtcaaaagtcaaggcaaagggagaattttcaaagtagcaacagaaaagtgatttgtcatgtacaagggatttcccataaaactaaaagtggatttttcagtagaaaaccttgcaggccagaagggagtgggatgatatattcaaagtgctgaaattaaaaaaaaaaaacctgccaatgaaaaatacttggcatgccaaaattctccttcaaaaatagagactttcccagacaaataaaagcagagaggctgggcgctgtggctcatgcctgtaatcccagcattttgggaggccacggcgggcggatcacttgaggtcaggagttaaagaccagcctggccaatatagtgaaaccccatctctactaaagatacaaaaaattagctgggcatggtggcaggcgcctataatcccagctacttgggaggctgaggcagagattgcattgagccgagatcatcgtgccattgcattccagccctggcaacagggcgagaatccgtctaaaaaaaaaaaaagtggagagttgatcagcgccatacttgtcttaaaaggaatgctaatggaagctcttcaagttgcaacaaatgacacaaacggtaacatgatagcacaagaaagtgaaacttggtaatgataaatatataggcaaattcagactactgcaaacactgtaactgttggatgaatcacttttaattataaagttaaaagacaaaagatattgaaaatatctgtaattaaatattatttaaagggatatggaatatagagagatgtgaattttaacatctataacatagtgtgtgatgggaaagaagtgcaagtgtagagaaattgaatgtaagttgttatcagtttaatatagactattttaaataaattataagatagactaatagatattttatgtaagccccatagtggccacaaagaaatacctatagaagatacaaaaaaggaaaagagaaagaaatcaaagtatatcagtacaaaatattcactgcaacacaaaggaagacagcatgagagagtaagacataggaggtcaaggtaggaggattacttgagcccaggagcttgagatcagcctagacaacatagcaagaccctatctgtaaaacaatatatttttaaaattagttgagcatggtggcatatacctgtagccctagctgctcaggaggctaatgcaggaggattgcttaagcctagataacaaagagctatgattgtgccagtgcactccagtctgggtgatcctgtctcaataaaaaataaaagacagagaaagaataaaaagacagctgtcagaaccacaagacaaacagacaacaatgaacaaaatggcaatagtaaatttttctctatcaatgcttactttacatagacatggattaaattcctcaaccaaaagacaaagagcagttgaatgaattagaaaaatcagagtaaactatgtgctgtctataagaaactcactttagatttaaagacacagatagtgaagggatggaaatatatattctatgtaaatggtcaccaaaggagaagtggctatacttatatcagacaaaatatatgtaaagtaaaaattagcacaagatacaaggaagaacattatataataatgaaaaggtcaattgaacaggaagatataacacttatatgtacccaacatcagagcatctaaatatataaagcaaaaatcgacacacctaaagaaataatacacaaaaaatacaataattataggaggcttctttaccccatttttaatagtggataaaacaaccagacataaaataacaaacagcagacttgaacagcactatagaccaaatgagcctaacatacatatataaaatattcatctcatagctgcagaatatacattcttctcaggtgtacatgaaacattctctaggatacatcacatgtcaggtcacaaaacaattcttagtaaaattaataggattgaaattataccaaatatctttttggagcacaatggaatgaaactagaaatcagtagcagaaggaaaactggaaaattcacaaatatgtggaaattaacacactcccgatatcctagtattcttcgcttaatgggtcaaagaaaagaataaggaaagaaattagaaaatattgaggcaaattaaaataaaaatacaacataccaaaacttatgggatgcagaaaaaaaaaaaaagaatgtgatatgctggtataggacatttaccatgaatggaattaacaggattgattatagctctgggtgagtcagtgagtgaatgtgaaggcctaggatgttactatacactactatagattctataagcactgtacacttaggctacactaaatttacaaacaaatatttttcttcaataaaaaattaatctgagcttactgtaacatttcgttttataaaattcttaattaaaaaaacttcttaactttttatgataatacttagtttaaaacacaaacacagccgggtgtggtggctcatgcctgtaatcccaacactttggcaagctgaggtgggtggatcacctgaggtcgagagttcgagaccagcccgaccaatatggagaaaccccatctctaataaaagtacaaaattagccatggtggcatatgcctgtaatcccagctactcaggaggctgaggcaggagaatcacttgaacctgggaggcggaggttgcggtgagccgagatcacgctgttatactccagcctgggcaacaaaagcgaaattctgtctcaaaaaaaacaaaacaacaacaacaacaacaacaacaaaaacacgttgtatagctgcataaagatatttgttatatccttattctataagcttttttctttttttttcttttttacgttttaaagttttttgttaaaaacgaagacacaagcacacacaatagcctaggtccttgcaggatcaggatcatcaacatctgtgtcttccacctccacatcttgccccactggagggtcttcaggagcagtaacacacatggagttgccatctcctaggataacaatgccttcttctggaatacctcctgaaggacctgtctgaggctgtcttacagttaacttttttttaatatacataagggtatattataaaataatgataaaaagtcagcacagtaggtttgtttacaccagcatcaccaccacaagcacgtgagtaatgctacgacattattatatcactaggcaacaacaatttttcagcatcattatagtcttatgggaccaccatcatacatgtggtccatctttgacccaaatattattatgctatacatgactgtattggaaataacaaggaaagaaataggagaacctcagttcccaaggtggagatcagttgttgttaaatattagagtgcgtcagaatcacctgaaggacttattgaaacacagattgctggacccttagagttgagtgtctagggtaggacctaacattttgtgtgtctaacaagtctccaggtgatagttatggtattggcctagggaccacattttgggaactatcggcctagattttctccaaaagtaggaggttaggtcaactgctgagaataagggaaagtgggcccttgaactctcctttcagccaaaggcaggcatgttctaaacactgaatcatgttaaaagtgaattttaatctgggggcaattctatgccaagccaactgattagtggtgggattaattcctaggttttagataacagcactgctttgcaaatgctcacagcttaatgataccatagaattattatcagcctcattttcacttgtgtaggaagaggcacggaaataaagaaggcaggagtcttctttcaggtttccttatggtggactctttcataagaaacagttctggcttctcctttgttgttccctcaaagaagattataaatatggttgcttgtctcccacctccatctgcctgagggctgtgctttgcttctgtaaatgtttcagttggaacatgttgattctgtttgagcatctattaacttaggtgtgatgtctaatgttcactgtctcaacgttcacctccactggggagagtggtggcgatttccctgcctctgtctaaggctggaaacattcgttattgtggaggggaaagtggttggttcactgaggtgggggctctgaaacacaggatgtgctttattgctcccacagtcagtcacaagttgacagtcgcatgaggctttcaataaaaatattttatacttttgtgctgcctctcagctgcagatcctaaagccctgttttaaagatcaaaatacccatagatgtgcaaatgccagggattcaacaaaagctggtgcatggatgggaaactgatgacacacacatctgttcagctctcatcaggcttcaccacccactggaatcttttggctacagaaactgaatttgtgattcgtgcttcaagtactgcagtcaacaactcagcaattcacaaagtctcttctgtgattgccgtcttaggtatgtgaggtaatggacaatggatatttaaaattgtgcctcaaccctgctttacctcatcacttattccggtatcagccaaatttatattagaatatgggaagtgcaggttttatataaaaggtgcctaggatagattctggcctatatagctctaataattggtataatactttacaatatagatgatattctcactgtaacacattatagtatacaacgtccattctgtcccctactttatttaaactcaactccataagaaccttgtgagatgggcattattccttaaggtaaaagaagaacaaacaaaaaatggctgcaaccaaaatgtaataattggtgtgaatagttttataataaaaaagaaagacttcactttggatatttgatggctgacacctttcagtttcccacctatcttcctttttctccttagccccacatcctgagaagataagagaacctgggctctcctccactggtgcccatggggaagttcaaaccacacaaatccctgtcctctaggaattctcattctagtcccaaccctcttaactatgataaaaactctaaaccatcaacaccacccccatcttgacttgtgtcaccttaggtagaatctgagcccttcaccttggggaatatgtgagtagtaaactttattttatatctgtaattcctatgttttattcatcctagcattcataaatttctgaggatgctggatgttcatataaataggtttattagctttagatagactaatgatgctttattcaaatgtgtggttatttcagatcaaagaaaaggaagcattgtgcttgacacagggctaagaactgaaaaatgaacaaaatatggcctgtgccctttccttagtagttatggtctggtagaaaaggcagacatgtacattaaaaaattataaaacagtgtcatatgtagcatgtacaagttattgtgggaatgcagaagagagagtggctggtttttccttggtttagcaatatgtgtgtaaagtcataagagcatgaaagaagattgtatgttgaggaaactatttttagttttatttggttggagagctgtattagtgtggagagatgcaatttgaaagggccttaaaggctctgctggtacattggattttatcctgagggcattggtgagttttgaagggctttaagaaatgaaataaaagaagaacacttttgaagagttcactttgatagcagtatggaagatagatgggagccgagacagaaagatacttgagaacaatactactttagtccaagtgagcaatgacaatggctaaatcaggacaaaagcagtgagaatggttagaggaggacatgtgccagacactgttccaggtgttgggatataaggttgaaagaggacagagaaattctgttttttatgatgtttttattctaataagggtatagaagagaaccattaagatccattctcttctctccagcagtaagaaaactccacagatgcagctgaacacatgactacccagaaaatagactacttttcagcctttgttgcagcttcctccaagtctagctatactaggttctggccaaatcatgcccttgaaatgaagaggcatcctcctcctttcccttttccctttctactggttggaatgggtacacagtgatgagatttcttgcaccatgtagccaaggttaccacaggcctgatagaacagcaagacaaaagggctctgaatatgtagcaacttcatggacagctgtcataccaggctgaactttaatgtgaaataactaaaattctgtcttgttgtttctgggtgtctcttcatcacagaagctgagcctacctcataagtaatactgggggagatatacagtcataatggagatttacatgaagagaatgctcaggtcttgaaccccacaaaggcagtcatctaagtgtataaataagttatataagtataagctgaagctgagtctcttaagcttaatatataattattcaaaataagtactagttgtaatttatatgcaaggaaaagctttgtagactgtctgagctagtcagtgagggctcctcagacaagaaagatccacttacgcaaggcacttacacgtgggagtgccagccagtgtgatgaaagagagactagagctgaatatctcatcctatgtctcattatttgaggaacttactaatcctgtattaagaatttggttaattatttgataaaggcatgagtttgttcattgagctgcaagctgattacagtagtaattacaataactaacaagaaaactatagaatgagataaatataataaatgaaataaacaaggtgatgtgatagagtaaatataagctgagcaaaagaatgctgctttagacaagtttgctacggaagtcctccaagagaggtgatgtttgattgatacacaaataataaatggcagttattgtataaaaagtagggggcagggtaggaactttataggcagagggactacaaatacaaaagctctgaggtgagaaagagcctggtatatcttcataggagaaaaaaggccggggtgaatggagaatggaaagcgcgtggggagaaagaaggaagttgaaattgtagagggagggagcaattagatcatcgaactgcttgtaggctatattaaggaattttgttttattctaacagcaaggggaagccattgtacagttttaaacaaaaacatgacattatttgactttaaaaaaataatgttttggttatgtatagaatgaaccatagaagcaaagtggaagcagagattattgcaggaaggtaatttgaaacagggtgatgccagagggaatgggaacaagtgaaaggatttaattgctttttagaaacattgatagggcttactatgagatgcaggtagaggtctgagaaaagaagtcttcaagaatcaatcatgctttttgcttgatttgctaggttgatagtggtaccatttgctaaagctgaaaacactcagggaaatattttttggggtataaaccaaaagatcaattttggacaagtataaaagtgttgatggctataggaaattaggtgtatgaatctgggtttcagacgagagagtgaaatttcagatgagagagagaataaatatagtattaatactttaatagctcattttatttataaaatatttcaaatatactaaaagtacagaaaataatttcataggcataatctcttgatgtacccaccatatagatttaacaaatgttgatattttgcttttttttgcttcagaactttaaaaaatataatgttgcagataaagttaaaggatgagagcattcttaaggatgatgggaagacagaggtttgaatgttatcttacttcttgttcactcccaatgctacctcttctgccagcagacaggtcctagaggataggaatgaagcctcaggttctgtcacagtcttgccaaggagtgcagaggaatttctcttctttgggaagaggagagcttgggcatcagcactgaagagccccaagattaggatcagaatgcctggatcctgggacagcttcgctctcagaaactcataatctcccacaaattcacatctaaagaaatataccaaaattcttatttccggattcctaaaaactgagaagtgaccaaacaggcagctggaccttttctatctcttgggttgggagagcatgacgaggccagagcaagaagatcagaaaggtttccttctgatgccttgacgtggcaccagcaaggtgtcctttaccagaggaaaaaccagaaaggagaaaacctttaagatatacctcatgaaatagagttactgggggaggcagacagtgacccatgacaaaaaacaaagtccttgggagattcaaatacaaaacagaaaaaaactttctggaaccaaaataattttaagaatttgacacaaaaatatgtatacattgtgaaataggtaaatgacaacatgtgcattacctcatatacttatttttttgtgatgaaacacttaaaatctattctcttagcagtttgcaaaaatatagtatgttggtgttaactgttgtcatcatgcacaatagatctcttgaacttattcctcctaggtgaagttttgtattctttgaccgacattgcctcaatccacaatctctccattttctctggcatcagccttttcaaatcaccttcctgcgatagtctctgcttccactttgtccctacaattcattctacccatacccaaaacactatttttcaaagtcaaattacatcatatttttgtccaaagctgtgtaatggcttcttattgctgttaagataaaacaaaattccgttccatagcctattagcaattaggtggtctaactactccctgcctctaccatctcaacttccttctttctcttcccttgcttttcattctccagacacaccgacctcttcagtccctgctaagcataattctactctccacttctgagttcaatttttttacactccatatataagtgagatcatgtggcatttgtctttctatgcctggcttatttcacgtaacataatgtcctccatgtccatccatgttgtcacaaatgacagaaattccttcttttttttttaaagaataaagaatatttcttttcatatatatgccacattttctttctctgttcatccattgatagacacttaggttgattccttatcttggctattgtgaacagtgctgctattaacatggtagtgcagatattcaacatagttatttcatttcctttagatgtatacccagtagtgagatttctgggtcatatggtagctctatttttaagtttttgagaaaactttctactgttttccacaatggctgaactaatttacattttcatctacactgtaaaagggtttctttttctccacatcctcttcaacacttatctttcacttatttgataatagccattctaacaggtgtgaggtaatatctcatagtggttttaatttgcatttctctgatgattagtgatgttgaacgttttttcatatacctattgggcatttgtgtttcttcttttgagaaatgtctattcagatcttttgtccatgtttaaaattagtattgagttgtttgagttccttatatattttggctattaatcccttatcagctgtgtggcttgcacatattttctcccattttgtaggttgtctctttactctgttgattgtttgcttggctgtacagaagcttttcagtttgatataatcccaattgtttatttttgtttttgttgctcatgctttcaggtttatacctaaaaaaagtattacccagaccagtgtaatggagcttttcccctatgttttcttctggtagtttttcattttcagatcttacatttaactcttaaatcaatttttagttgatttttgtttatggtatgagatgagggtctaatttcattcttttgaatgtgaatatctagttttgccaacatcgtttattaacgaatattctcattgtgtattcttagctcctttgtcaaaaatcaattgaccattaatgtgtggatttatttctgggctctctgttcttttggtctatgtatctgtttttatgacagcaccatgctgttttgattattattgctttgtggtatattttgaaatcaggtagtgtggtgccttcagctttgttatttttgcttaagattgctttagctattcagggaattctatggttccaaacaaattttagaattggttattttatttctgtgaaaaaatgccattggaattttgatagaaattacactgaatttgtagatcactttggatagtatggacattttaacaatatgaattcttcaaagccatgaacatagattccctctccatatatccgagtcttcttcaatttcaatgttttacagttttcaatgtgcaggtctttcacctccttggttaaatttatttctaagtaatatttttgtaggtattgtaaatgggattgttttcttgatttcttttgtggataatttgttgttagtatatagaaatgctactgatttatatgttgattttatatactgaaactttaccgaattttgtttaatagttctaataattttttgtggagtctttagggatttttatttataagatcatgtcatttttacataggaacaatttaacatcttcttttccaatttggatgtcttttatttctttctcttgcctaattgctctggctaggatgtccagcagcatgttgaatagaagtggtgagagtgggcatcattgtcgtgattcatatcttagagggaaagcttttgacttttcacctttggatatgatgttagctatgggtttgtcatatatggtctttacagtgtggggtacattacttctatacctaatttgtttagttgattttattatggaagatttttgaattttgtcagttgctttttctgtatcgagaggatcatatggtttttgattttttttttagatttgcatatgttgaatcatccttgcatccctgggataaatccaacttgattatggtgaatggcccttttaatgtactgttgaattcagtttgctagtattttgtgatgatttttgcatctgtgttcatcagggatattggcctgtaattttctcttcctgtagtgccctgtctggctttggtatcagtttaatgctggtctgaaaatatttatgtagctcaagagcaagattagatatagaaatgtggacttataagttttggggcagataaattgatagttgaatgttttatagacagggaaatggaatccacaaatgagtttctagaatgagaaaaggacaacatttgaaaggagggggaatgcaaagagcaagttaagacaatggagatgaccagccctgaccatacaagaacaagatcagagacaggaaaaagaagcaattaagcatactgcaggtaagtcatgtaaaataaaggcaggaagtgtagcttgggtctggagatttggagagcatttatgacttcccatttccccataggccctatgaatctagtagtcctggttcttacatggggagcattcctaccagagaacatgataaatataccactcaaagctatagctgctacctggtcactttgggctccttataccagtagatgaataagcaaagaaagaagttaacatattctctgggataatgtatcctgatcatcaaggaaagttaaggctgctgctaaatcatggaaataggcagcacatatattgcaaggagagtaaagttgagcaaaggcactcctacttctgtgccttgactccctgcccatgtgttctcctatttggactgtagaaccacataatggctattggtttaaagtgtattcctcatcctaaagtatagggttccatgctatagagtgtcattttcccactagcacctcagtggcaaatttgagtccattacatatttttctattgctggcagcttctggatggtgtggtggtcataggattagtgcactccctggctatttcctctacatcacacatcctttgctgtaaagtgatctcttggcctgagtaaatattttgtagattccaatttggttgtcatatgctttgagtttttggatagtgaactggctgagacactgtaggcaggaaaggcaaacccagaccaagaatacacgttaattccggctacagtaaacataacctttccctgggtgaaagggtccttatggaatcaacttgccaccgaatggcaggttggtctccttgagagatggtctcaactttgctttctgttgcaaggaggtccaacattcatcaacagcagttactaaatcagctttgaagagatggagcctatgccgttaggtccattcatagactctgtctctatcactgtggctacactgtatgtaagaccactttctaggcattaaggtggtcaagtatagagatttgctgacatatctggcccagtcatccttggggttctgtaggattcttctgcagtggattctgtctggtaggcacaaatgtacaatagaacaatccctgcactttgtgcccactctcataggttcatccatatgcctcttacccagaccttttcatacctggtcttccaatcttgtttatttcaaggctgtaaccagtcagctaggtaagtcattagtccttatatcccagttttatgccacttttcttctttccctaactactgtttttcagtgctactctgtggtacaacagcaattcattttcatcttacacccacacactgagttgatccatccatgtactaatcttgggctttttctccctcatcaacaggtcacaggaaacccttcatgaattcataggtgtgaaataggggagaagcattataacagtgacagaaagcatgcgggtttgtgacatatgtttgtgtatctttcttataccttcttacacctgctcaagtttgaccctgggcacatcctatccatgttatggttgattgctgctggggtcacctgattttatgatttgttggatctattggtatctgtggtgtgctagtaaatgattacttctgaaaaatactgccttggcttgtagcatttggtggcttctatggcataaatatgtctactatggctgatttcaagtgccaaactgatgtcagaatgtggagttaggaagagatgtgatggtatgaactgtctctagcacatcactatcttcagctggtgagagcagttctggtcacgtggtcacttgatgtcatttgagtttccatggtttgttactcattttctactggggcccaatggtatgccaggaattgtttatcaatagttcatagtcctgtactgtagatgtcatagccttgccctggaaccctagaagtgtgcactgtataaaacacattttgctactacaattaattccagtactataggtgatgtggtgcaagcaagagtcctggaccttatgcagacccatttgttgcctggggctcctctcaaaagttacacctctttgcatcgtttggcaaatagatcataacagtagtctcaagtgtattatatgttgcacctcaacatcaaagaggtctgctgaacattgtgattctctttcaaagctaggaggcaagatagtaatttgccctttactttggaatacatatcccaggatgctcagaacactcggaccctaagatgtttacctatggggcagcctcttgaatcttcctctagaacacacgtttctttccaaagcatccagaatacttgccactttttgcacatcaggcacggttaacatgacatcctcaatatagtggaccagtgtgatgttctgcagaatgtccagatgactcaaggctgtgctgacaatgttatgacaaagagcaggagaattaacacagccctggggcaagactgtggatatacactattatctgtttatgtgaatgagaacttcttccgatccttctttctgataaaaatgaaaaagaaaacatttgccagttcagtggcgacatacttttggtgtgcttggtgactcttggttaacaggtggtccacagtttttgcaaggccaggctcggctcgtgtattaaataggaccccattagggaccaccattcctgtctccttgaagacttggagggtggcactaatttttgccatttccttgagatgctgttatgggttgaattatatccccaaaggatatattgaagtcctatcccctggtatctatgaatgtgaccttgtttagaaatagggtggatgcagatattattagttaagatgaggtcatactggaatagggtggaccctttcccagtatgactggtatctttatcagaaaagggaaatttagacacagctatagacacagagggaagacagttatgtaaatctggaggcagagattggagttatgctgccacaagtgatggattgcctgggggctaccagaagatggaagagatgaggaagaatcctccttctaagactttggagggagcatagacctgctgacaccttatttttagatttctagcctccagaactgtgaaataaacttctgttgtttaaagccacttagtttgtgtactttgttatagcagccataggaaactaatacagatgcaatatatatactatatataatatatatgaatacatatacataaatatatatactatatataatatatgcatacatatacataaatatatataatcatatatatttataaattcattatcctcgtggaagtgtcttactggcatatccaggatcattctctgggcctttgctacaacaacagctataactttacaattcaatgaacaaagggttctgccaactgctaagtatgcccatcccaattgtacatttggaaattgtgcaaaggcccacccgtacccattgtgagacagacatggtttggactccggttgctagttgacttccatatacctctactcttagcaggagggtaatgtattagtcagggttctctagaatcatatatatattatatatatgagagcttattatgtattaacttacatgatcacaaggtcccacaataggatgcctgcaagcttgaggagcaaggatagccagtctgagtctcaaaactgaagaacttggagtctgatgttcaagggcaggaagtatccagcatgggagaaagatagaggctgagaggctagaccagtctctccttttcacgtttttctgtctgttttatattcactggcagctgattagatggtgcccatccaattaagattgggtcagcctttcccagcccactgactcaaatgttaattcctttggcaacaccctcacagacacacccagggtcaatactttgtatccttcaatccgatcaagttggactcagtattaactatcacaggcaatgatggtgtttgggatctttggctatcagcatcaatctgtattcacgtgtttggaaatatctgagtaatttacggattgatcgatggtgttgcaacatctttcttgtttttcagttgatgtgttttgggtcacagaactggctcaggcctaaaagctgagcatggaaataaggcttttcactgagcatagctgacctcaaacttctactctgccgtcacgtatctcttttgaatattcatattcaaatacccttattggctgcctatctatcttgcccctagggacaaaatgttctatgagccctttccataaattctgtgggtcatgccttgctgactcattctgaacttgctgtggattatagccttctgtccaccgctcttctattgggtacatgctgccacctagcctctgctcttctcagatcctatcatctccattgctattagggaacccactaccataacaatatctcacatcattattcccaggggtccttctgaccttattgccttgggcatgtcttatgggcctccctaaggaatatggtcggtacagggttttctgtctcatagaacggacccattgcttgcatgttgcttctgtgagccttttaagcccttcctccatcatttgctacagcaattctggcatctctattttgtttactgtaggcctttccttttctcaggctttcaaagttaattgtatcagctgattacagcaatcactggggctcttgccagggcattaaatcctgtgtcactggaaagtgccactatattgcaaaacactccctaacacagctgtatagcctatcttctcttgatttaaccccctgaggaaccacttccagttcctgatggtaacatgttatccatgtcttgatgtttttaggcatataatttcttttctgctttacctgtcccaacacttttgatcaggttatgctgagattttactctaattatgaaccaagagaggaagtggagcaagtcctgagaaggtaaagaaatgttatctaagatacctgcctcacttgatacctttgtataacttcaaacgtgtgtgtgtgtgtgtagctctgtcttccaataagagataattggtcacattttcaggtgcataggactcaggataacccaagatttgagattcttaactgtgtcgatacagatatccccatccaagcatcagggccccactcccttcagggctctaagtttgtgtaagagacctgcctagactgagatccagctttctctgatgcactgctaacaattaattttgttttctcttgttcttcaaccgtggctgccatccaggtgcagaagtggaagttttatttaaatagtgcctaggagttcctgttactctcactttgctaatttactttgttgattaatagacttgaacctgtcattttctctcttcaatcactggtgctgagcagtagccaaccaattccacattcttatagttgttatttcttcatatctctaaaacacccagagtattgtcgcagctattgcaccgcttccacctgtatcccatcacaggacagcataggtgaaagccagtaaaatgcaccagcattccaaggactatcaacattccacctatcaccagcaatagggttctcattatcatccagctggaaaatgatccaactccaggatccccatctttacagtctgtctcttagaagtgcttcttgtatcagtggtcatagattgggttccattcaggttagggatccttgtttaagtcacttattggggatgtgctcaataggggagtgagggaagcagaataggatggggaaaacgccaagcaagaatgtggtctcaggagggactagcttcagtctgatcctacaggacactggagcacaaattacacaacagaactagtcgtacatagagaaaaagaggctggccttgtgtatcccatgccaggaggtcattggctgagtcaaccctggagaagggagggaaagtggtgtatccacccaggcaaagtggcttccatctggttcagggcgattctctggaataggggtgagctgtttgttgttatctccaaaagtcacagcaaatgggagatggtacaaccagaaaagggaatgtgggcaaacaccagccacattcaccacaatattacagagctattaggaactataatgatcagcatgaagtttttctgtgtcctaggtaagaaatacatttctttaaaccgtctggaaatcttctatagtcttggataagaaggttgtgtttatctttcctcctttttagtggaattatactcaatcccaaatgcccattcactatgtttaacaagggaccgtcacgcaaatagcatctctcttcctggtctgctgtcaactcttcaagtctccacatcaaaaatgttattccctactgagttaactttacttttctctctccttacctttgttcttgcatataatggttgcagtgagggattatgagaacatctcctttcagatacgttgtcacattcagaattgtgtgatctagcatgagaaaggcttaacctttttcctttccatgtgccagtgaaaatttctttatactaatacacgttatttctgaaaaggggatgagagaaagggacaagagaagggatgatacaaaagtaatgtagaagtggccaagaataagatttggctttcctatttttttagtttgagtttggaaatttatgcattctttttgtttgtttttgatccagtaaaaaaagtgtcacctctcgtcaggacttcaatagttctgaagggtctggaagtaagtcattgtctcctgagttgatttaaggcagtttatgatgagagtcattctgttttttattccctaaaactctgagcatactgctgagtgaatagtctgtgctccacaactacttgaaaaatggtgatgcaggccaaagtgttttgaaaactgtaaaaatccatgcggaaatgaggtaatatgattgctttaaattgacctctccaaaggctctttcaccttttacctgttttacctgttttaccccatatatagatcccaatgttcttcctcctacttgatgcagaatgcctgtttcattttctcctttttagccataaaaattccaagtataattctagggcttggtttgaatcccactgtgaggaaacaaatcccgatactctaaggtttggcaatggaggatgaatatccctttagggaaaacgatggctgaaacctgtgggtttcactcgtgtctactgagattctcctaagggaccttcttttcttaggacagtgttttcaaagtgtagtccgcacgtcagaatattagcattactagagaacttgttaaaaatgaaaatgattagctctaccccagacctattaaattttgaaccctgattgtaggaccctgcagttcatgtttcagtaagccttccaggtgattgtgaggcccgctaaagtttgagaaccattgtcctagggaatcacttactgatcacttttgataccaccccattagcttcaggaagtcctcctcaacttagcactttacaccaaattaacccttaattgttgtggcacagtcaaaacatttaaactagctttcctacctaatgccttctccatcataaaaagaaagtgaattcctaacattaatgtataattaggccaggcgcgatggctcatgcctgtaatcccagcactttgggaggctgaggtgggtggatcacctgaggtcaggagtttgagatcagcgtggtcaacatgctgaatccccatctctactgaaaaaatacaaaaattagccaggcatggtggtgtgtgcctgtaatcccagctgctctggtggctgaggagggaaaattgcttgaacccagagatggaggtttcagtgagccaagatcatgccattgcactccaacctgggtcacaagagcaaaacttggtctcaaaaaaataaaaatataaaaataaaaataaacccaccagttttatagtcaggcaaactacactttgactcctgcttttcactcaaccacgttgataggaaggctctgcatctgttaaatgatggtaatagtaatatctaccttttaagactatggtggaaattaagtgagttggtgaatggaaagcacttagcaaaacgtctgactcataggtggttttcagtaaatgataacaaatcataatttagcttagtcatcatcatttcatagccccctatctgcagtgggtctcagagactagctctcaggccacctccaccgggcatggaacattttttacctttggaatttagaggcaaccctaagcatgtcttgggcccttagggtgtaagccaagagagaagcaggaattctcttctgtgtctaacttccactgtccaaattctaacttccactgtcttaagacccttctgtcacctaggatattgtttttgggaaacatcaggcccattcccaacatttacagggactgaagcaggagtacaaatggaaggcccacacatcatatatgtatttataatttacagagcaagctgaaaatgttttatactctgggtaggcaggatatcagcccacacaatcccaggaagctgtgactatgttacattatgagataaagggactttgcagatgtgattaagttcagggcttgagatggggtggtgatcctagataatctagtccgatgaaatcacaagggtctttataagaaggaggcaggagagtcagagaaggagatgtaacaaaggaagccaaaattggagttgtgcaaatccatgagtgaggtagtgggcagtctctagaagctgtgaaaaagcaagaaaagggattcttcccttgatccccagtgggagtgccttgctggcccattttagactgctgaccttcagaactgctccttaatatatttgtgttgttttaagtcataaagttgcagcaattagttactacagtgataagaaactaataaacctcctaccttcataacagtacaatttttaaaaaatgtgtacatatgtttttataagactgaaagttggcaaaatatcaatggtgattgaatttgattattattttgcataacaaatggtctttgaatgactcaataatatttgggtgaataataaaataaagaataaaataaagatacaatttattattattattttctgtttaagatggagtctcgctctgttgcctaggctggagtgtagtggcatgatcttggctcactgcaatctccatctcccaggttcaagtgattctcttgcctcagcctcccaggtagctgggattacagacatgccaccacacccagcttatttttgtatttttagtagatacggggtttcatcatgttggccaggctggtctcgaactcctgacctcaaatgatccacctgccttggcctcccaaaaagctaggattacagctgtgagccactgtgcctggcctcattaattatttttatctcataacacttatttttctttcctgtatttcagcacaatcatgagttatatggttcagagaacttgtttcttatacacagtattgccaaactaggccaccatacttgaattactgtagttcctagctaatatttttaaattattttcagtctggagaaacttggttctactgaggcagtagcaacctaattgtcattaaaactcttaaagaatactggattaagaaatagattattaagttatatatcacgttcatgcattataaggggattgtctatgatgcatgatctcatcatgatcttatcatgatctcagaaaaaaattaccaagtatttaacttaagcaagtgattactgttatgtatattttgcttttcaacacctacaaatcaatatctagatgcctagagttttacttaagtttcttttttcccccaatcttttcaatggtgaaatattagaagaaaattttaaaaacagaagtatgatgcttaatttgatcagttctctcactacatttgatactatttctaaataagaatgaccagtctgcaggttctcatttgtttgtgcatgaattcctttgtgttcatataaatattttctatttcctttttctaatttttaaatattttattgttgcatctcacatgtagtttatttcaatttagaaaaaagtgttcaaaatatttgcaaagactttgtattttttttaaaatgaagtagccaaacctagattgttagtgtttttataaacttctgccatataataagtggcaagcaacaattcatactgcatcaatttgtgattctcttgagaatcgcaaacaagaacacagagacataagaaaacagacgcttggcacttgtggaaaatggtgtgttattatacaagaatcttctgctttagttctgtcagagagggcagaattgagtaaatactttgtcttttcttttaccaaaatccttccctgtaccctggagccctgtccgtccatccatctcagatgttagtttcagcacagtcccgtaaaccttcaggcactgacacataaagaccttttgttctgaggactgggaagagagatgtagaaaagtgtttccctagggcgtggacagtttatactacatccactaaagtcaagtgcagttctgagggaacccttttatgggattttgcattctctacccatagaaatgtgtctttctcctcttattggaaaaacaacaacaaaagcatagaaatagtaatagaactcaccgcaacagcataatgcaccaagtggcacatgtgtgcacactgacactcacacaagtgaaaaactgaagcaagtcgcccaaatttgcatgggtaacagatttgggattcgagcccatgtctacttcacattgagttcattctggtacgtcatcttgcttcctcaagagcagggtgttatcctttctctggtttatctagcagcttacctgtatttgtcactcaaaactgactcacatttcacctcctggggaaggtgccccaattcccttttgaactttctacagtaacatgctcttcagtcatttatagggttacgtgctgttctcacgctggcctctgattctttgaggacaaggactgtgttttactgctttctgcatttctgaggcctaagagagcgcctggaatatattaggagctgaaatatgggataataagaaagctcttaattttaaaaaagaaatatgctaccactataattcagcatattaagcaataagtatggacatgaaatccagaagtcacataaattcatctttaggtcccagattgatagctgctgggatatttttagagaattttgaaaagattccacagttttcttcagcaatttattcaaatatgggccattctatactgtcagcaaattctctctgatatttaacctgaagcagtaacctataaatggtatgctgaggctctgagagagctggtataattgccaaagttgcagtcttactactgggatatatttaaggtttgggaaagtcttaattcagcacattttgaagagcagtatttttagttccttgggtgaatggtcctgttttaattcaggaaacaaaaggtgctggtttagctaacagtttgatttcaatctctgaagcctttccaccaattattttctttttcaagcaaaatcaatctttcctccatgttctcaagtccaatttatttaaaacacacacgtacatgtctgcaggcacacatacatacacacacatagtattacagtacaactattatatactgttttagatgtagatatagaaagaagtatagatatagattgcggtttcttgagtttctaagagtttccttattgtttgcttctccagtgactttgcaataacctagcaaacttccagtaaatgttcgcgaaatacgtgaatagtaaatgagagaaatgaggtggagcttgaaataatcctgccacctttgttcctatcactgtaaatgttatgtatacctgtctcttttcgtagaaagtcttgcacatatgtacccggagaagagacagtcattggtgtgattgctgtcttagagggtatgctcagcttgaactttaccaggaaacaacaaattatttttgaaagtgattgaaaatttatactcctaccagccatgtataaaggttcctatttatctgtgtactctctgatctttgatattgtcagacttaatttttgccaatctagtaggtatgtacaggtatctcattgtgactttactgaagactggacaattttcagatatttatttgctctttatttttttattttctgtgacatctctgtttagcttttttgttctcttttgtttttcttctttattactgatttgcaggcatttttacatttatgtaaatactaatattttgtctcaggctggcttgtctttttaccctctttctggtgcttcttggtggataacattcttcattttgatgtagttgaatttcatcacccttttattttatatggtcaatgctttgtgcttaaaaaatcctttcctaccccaactttataaatatcttttcctatattttctctaaaagttttaaggttcgccaccattcgttgactgatctttctctcagtaatttccaatgccatgtctgttacacagcaagctatcatttatgcaggggtctgattctgggctctctatttgtttggcctgtgtgtctgtccctgagcctaattagtaatttatatcagtaaggcattttctcctactctgtcactcttcagaaatggtgagttcttcctgctcctgtactcatcatgtaaattttaaaatcactggttaaattttatgaaaacctgttataactttcattgtaattgtattgaatttagaaagccatttctggaaattggcatttttttggtattgtgtcttcctatctattaacattctgtatttcttgatttatttaggtctgtcaaagtctttagaaaatatttataattattattcttaggtcttgctcctctttgttacattacttcacttttgctactattgtaactagtatattttaaaaatatatattttcaatctgtggctgatcatggaaataaaattagattttatattttgacattacaaccagctgtttgttattgattattatgcataataacttgtcttgagaatcttttgtgttttacataaaaatccattttctgcaaatattaacactgtgtttcttcccttctaatctttactcctttaatttttttcttgtaattgtattgggtgtttagtacagtgctgaaaagaagtgctattatagtcatgctcgtcttgtttcatattgtacagggaattgcaatcagattatgtctgttgtaggctttttatagatgcatttgattaggttatgggcgctttttgcgttcttagctttataagatttttaaaaatatgcttgtgttggattttttttaaattatatttttccctgcacttattgagatggtttttttaaaaaatttattgatatggtgataaatatattttctaatgataaactgccttttccttcctaaaataagctcaacttggtcaagatatattattatggttttaaatttatatttggaaagtttgcctatattttatttaatttttttgcatctagtttcataagtgaagttgactgatatttttttcccacattgtggtattttaaaaagtatcaatgatatggtaggctcttagagtgacttgaagattgtgccctctttttatcttttggggaagagtttaaaatttataaataatgtggtaggattcacctatacaatatctgggtctgatattttcttcatgggaagattttttaaaactgtgattcgtttttaacctatttaaagcctactctttattcttaatactgttttaatgttatgttttttctaataatgtgtccattttgactaagttttttagtatgttggtataatgtgatacacacacacacacacgcgcgcgcgcgcgcgcacacacatacacacacgcaaaataccatagtgttaccttatctttttaacctgttttatctgcagttgtatatctgcagtaatctgcagttttgtatctgtagttatgacttatatagttatatttaaaacttcttttgaaacaaatgttcgtaactgcatatcagaaaagtattacagaaggtatttaatcatttaaatttgagtgtgttctgtgcttcccagatgcagaaataaaatattttcttttgttttattttccaacacaagagggcagcattgctgcactgttaatttcctgtaggctaacaccgctgtgccttgtgtaggtttaaatatacagcacatctctttcaaatggataatcatttgaggattgcataaatgtggaccttgtctatttttcacttacatgacattcattgaaatttagttttgaaaacaatactctctgattagcatttatacatgttttatatttgcttcattgtttctgattctgtaacaatcacctcattctgagaagactaggtactgttgtgtttgatagtgtgtatgtatggtaattttctagaaatctgaatttttttaaatgggcttttcaatgatattactgagaaataggtagggtactattttgacataaaggataaagaacccacaaagtccatgagcttcctgtcggatatgagagattaaaactgctgctgactacaccaccaggtccatgtcaattaactcatttgcagatgggaggtgagagtgcaaaaataatattaacattaatattaagtaccattactggctactcattatagcttagattctttatttgctctacttagatttatttttataacatcatcctgtaaagtaggtattattacccccatttttacagatgaggaggcagaagcttgggttggctaactcaccccttagttcatgagggtcagaagagggtgctgattaataaatccccaggctttctcactactgcacactgcctcaccatcaacagcaaaacaggttgaattcgacgattcagtaaaaaagtaattttgatagttgagttcctttatcccttaccacgtctatttcacatatatgattattattattttggtagagatgaggtctttttatgttgttcaggctggtctcaaactcctgggctcaagcaattctcttcctcctgagcctcctaaactgcagggattacgggcatgagccacgtgcctggctcacatatttgatttggtctaggctatcttaacaaaatacaaaatgctttgtaaagtctacattttattattgcatttgctatttttagctctttatgtctgagcaattgtttaatgcctgtgcctgagaatctttttctcaacaggggaactgcgggggagattccagaagttccttttagagttgttgtttcactgtatcagtgcatcggtgactgagaaggaagtatttgcttttgtgtggcagcgcagtaaattcgcagaacacagttccaagaagcccaaggcactagcaagaatgataggtcaccatctccattatctgtcggtggtggatatggaagatagcattctatattaacttttgagaaagagaaagttaggcaagaagagattgctgaaatagattgtctgtgattgctgaggttgaaagttttttattcttggccaaggaatgtatcttttgggtttaacatcactttaggagtcagacagccttgaatgttagactgagctttgcattttttaggtcatgactttaggcagattccctgagcctcagattcatcatctgtgaaagaaagataagactaataccaatttatccaggctaaaaatatatataaaaatatattttttcaaacatacacattcaaaaataatgaccatatttttaaatgctatcctacgttgtgtcaagggcaccagtttctaacttagagacatttgcaattttgagcagtgtcttctgaggccactgggtatctctagaaagcttgaagtttaggagtaaacagaaaaaagcttgtgaacatgctttataaactgtaaagatttgtaaatatataaaatcattataatggctcctctctctgaactcaacttccactggatacatggcatatacttttgcatgtatcaacttagctcaaatcaataaaaaacatttttggactcctggtaagtccaaacatttattcattaaaaaaattattagggacctaaatgtacactgttttaggcactggagattggacaagaaacaaaacagatgaaacctttgcccgtggagcttgtatttgtagaggtgacatatgtggatcacacataggtaggatgtttcataataatatagagaaaaataaagtctaggcaaatggctagagaatggtggaggcttgctactttagatggaattgtccaaaagccttctttgaagagggaaaaaactgagcaaagacttgaatgaaagaaagaaaccagccatacatctgtctagaaaaactgagttattggcagagagaacaaaaagtcaaaggccttgaaatgaggatgtgtgcctggtatgtttgcaaaatggcaggaaagctatggtaaaccatacaaattattgggttttccatgtaatccattgtctctttgagagacgatatctattataatattataattttatagctcctcttttataggtgttcataataagaataaagataataattagtactttttgagtacttgccatgtgctatatttgtccttacaaccctcccaaataaatataattatccaccattatacagagactctaaatagctttcctaaggtagcatattcaataagttggtgaggcaacggtttgtcttatttcaagtgcagggtgcataataactcaatgggaagacagatgagtgaaaaatgcgtagtaatgtcagagggcttatgaaaggtacctagggaaggtgtcatgaagttacttagggaaggtgtcatgttatgccatagaggatcagttccttaaggaaggagaagatggattgggagtggagagagaatttcctgcgagaaacaaaggcatgaaggcttgaaagagcatggggtacatacgcagtaaataacaaacagttaagtgcggctgaagagtctgtagcatgcgatttaacacagatgcttctccacttataatgagattacaacctgataaacccattataagttgaaaatattgttagtcgaaaatgcacttaatatacgtaacccacagagcatcatagcttagcccagcttaccttacatgtgcttagaacatttactttagcctacggttgggcaaaatcatctaccacaaagcctattttataataaagtattgaatatctcatgtaattgattgaatactgcactgaagtgaaaaacagaataattgtatgggtactcaaagtaaggtttctacagaatgtgcatccctttcacaacttcctaaggtcaaaaaggggtcagttgaaccattgtaagttggggaccatctgcagacatgctcaggtgctactttgccaggcagggtctgctactgtaacataagacacctcccagccatggctgattggacagaggtggaactctgacccacaggtagcagaatccactgttttactagggacataggatgtgtgtggcttgactcaagcagctgaggtgactgaatcagattctgactttcaaaacattgaagcaaggatgcagaaactgttgctagtccatgaagggccctgggatagggagattatccaaatttgggtggctcaagaggtcattgggccatgggaaagctgattaggaagctatctacagaaagagaaaaatggaacaagtacagagagaagcaaagatggaatattatgaaacctcggagagaaatggagagcagcagatcctcagtttctgttgcatttccagttctttaggcctcacgaggcaggtctatgtcctgtcctagatcccagagatctttctatcccaaaattaggggggccatgtaatttagatccaaaatggcactcttttgaaagtgaaagtggctgctattaataattacagacgaaaacctccaaatcactgggaaaactgggttgtatgtggtggtgggctaggaagtatttaacaactgggtccccaggaaacaacagcaacaacaagccagaatttgattggtagtgtttgtcgatttccatgttgtaaatactctcaccatagctgatttccagctaccaactggcttggaaaattcctgaaaatttaataatcacctttctcaagatgcgacaagtcagctcccgtacaccactggatgcatactgccttacctaaagtactctccttctatactaaccccctgcccccacctttatttttacttgggttttgtgagtttatttgaaccttgcaactccaaaagcaccgattagaacagtagtgcgtttggccctgcgactgcaggcagtgggaggcctgcctacaagcctgccctccagctccttgaagagagagactattttaaacttccctttcctccccagcatgcccagcacagcgaggagaatgtcgcagctgtcagtaaatgcctactgcattaatgcttgaggtgtccctcattgcacccctgcagcaaggttggccagctgtgatttacaatttgcctgtcagcagtgggaaagtaactttgtgacagcagcaaacaccagcttctcagaggattttgagacctgggttctgacatttttacctagatgtgattgttgtcagcttatcatcccctgtcaagttctaggcttccttgagcagaaaatgaagtttattaactcagttatgggatgctctgactctttagccacatgggtgctaactgcttgatcagtgcctctccttagtgtgttcacattggcctgaggcgagccctgtcacactcattcttccttcttcaaataacacaatcattgccttccaaaaagcagaatcatccatcctgttttagaaacaaactggttacccaaactaattagctgagcttggactgtacaaatacctttttacctggaatccaggtttttctttacattttcctctcttttatccctatttatgcttgtatgtaaaaatctttatacatttgcagaaactggtaaattatcagaagaatttggtttctgtcagctttcctaaaagcaattattttccctgtttctgagaagtgataagaataaaaaatatttcctctgaactttctgaatatattattgttaaatgattgatataacacttacactgagaaaaaaatttattccaggtcaggcacatgggtgagctgacacacacatatactttcttctctagcagttctcgggtgaaagagaatcaggtgaaatgagaattctatgcttgtactaatactgtcttttaaagttgtttatttacaaaagtcttcccaggttacatgccaagcaataaaacggttaaacaattaaaaggtttccaagacaacttattgcaaagtaccataaaaagtcagctatgatatcacacttgtaattgaagactctaagtctcagctttcagtaagcatgcattagtatcaagaaggtcaagattcatggattctggtatttttggttatggcaagagaaattaacttttataaaccatagtgtgaaaatcaattcaccagaaaactctgtgtgtttacaatgtgtccattaatgtcctggctaatgtaaaatgatgaggacatgagtctaagtaatagatgttcataaagtggaatatatagagatgtttctagagcattatttaaattttgaaaaagaataacaattctacatctccagtaagtgagcatgatttaatttggacagatagtgaactgctatctgaccatttaaaaccatgttgtagaagaatatttgctgctgtgaaaagatattcagaatatattgctaagtggtgaattcagctacaaaacactataataacaatttttgcatattgtgtatgtgcatgtgtgtgtgtgtattacatataggactagaaaaatataataatttaacagtggttatacccagtggatatatctggggagagtgattaagtcatattgctctatttgcctatttgcatttttcactgtgctgtttttactgttgaagcacgctcggctgttttagttacaggagaacttattctcatgagtgtactgaattttgaaggggatagaatcttacacaattaactaaaatgagacatatatatgtgccaaatgtatggtgtagggtcctgtaattcattacattcctgcccttttatttagggacaggttttagaaaggtgagtgggggtaacctagaggagtgaaaacaccttgggtaacatgaattgatgcctgcttaaagagttaaggcatttcctcccccccccatggaaaaggagaacaaagcttttactgtacgattaattagaattcagctttgcatagtctgtggttacaaacttcagtgaaattggtgcaggatcctattctcaaagggttacaaagcacatattgttgtcaaagtacccagtacagaaagatagcatcctcagaataaaaattaagtacattttatatgaagcgatacacattagacactttcataggtttaaatattaaacagtggtgaacagttccaggaatcttgtgatttttttttttttcataaaatgaatgcccttatttcccagaaatccaagacttaacatttcttaacagcttatctgatgggaacaaacccaaactggcatgtaaatattatcaaccaggagggtttccaattaatagatcaaggtaaaacaaaaattacattttattcaacttttgccactagtgcttagcacagtgcatagcgtattattggcactcaacaaaaacatgcatatttttctttaagactgttgaataaacagaaccaacgacaaaaatcacgtgattatctcaatagatgcagaaaaggcctgcaacaaaattcaacaccccttcatgctaaaagctctcagtaaactacgtattgatggaacatatctcaaaataatgaaagctatttatgacaaacccacatccagtatcatactgaatgggtaaaagctacaagcattcccttttaaaactagcacaaggaaaggatgccctctctcaccactcttattcaacatagtattggaagttctggccagggcaatcaggcaagagaaagaaataaagggtattcaaataggaagagaggaagtcaaattgtctctgtctgcagatgacatgattgtatatttagaaaaccccatcatctcaggccaaaatctccttaagctgataagcaacttcagcaaagtctcaggatataaaatcaatgtgcaaaaatcacaagcattcctatacaccaataatagacaaacagagagccaaatcatgagtgaactcccattcacaattgctacaaagagaataaaatacataagaatacaacttacaaggtatgtgaaggacctcttcaagaagaattacaaaccactgctcaaggaaataagaggggacaaaaacaaaaggaaaaacattccgtcctcatggatagaagaatcaatatcatgaaaatggccatactgaccaaagtaatttacagattcaatgctattcccatcaagctaccagtgactttcctcacagaattagaaaaaattactttaaattttacatggaaccaaaaaagagctcgtatagccaagacaatcctaagcaaaaagaacaaagctggaggcatcacgctacctgacttcaaactatactacaaggttacagtaaccaaaacagcatgatactggtaccaaaacagatatatagaccaatggaatagaacagaggcctcagaaataatgccataatccgatctttgacaaatctgacaaaaacaaacgatggggaaaagattccctatttaataaatggtgttgggaaaacaggctagccatatggagaaagctgaaactggatcccttccttaaaccttatataaaaattaactcaagatggattaaagacttaaacataagatctaaaaccataaaaaccctagaagaaaacctaggcaataccattcaggacataggcatgggcaaagacttcatgactaaaacaccaaaagcaatggcaacaaaagccaaaattgacaaatgggatctaattaaactaaagagcttctgcacagcaaaagaaactatcatcagtgtgaacaggcaacctacagaatgggagaaaatttttgcaatctatccatctgacaaaaggctaatatccagaatctacaaagaacttaaacaaatttacaagaaaaaaaacaatcccatcaaaaagtaggtgaaggatatgaacagacacttctcaaaagaagacatttatacagccaacacgcatatgaaaaagagctcatcatcactggtcattagagcaatgcaaatcaaaaccacaatgagataccatctcacaccagttagaatggcaatcattaaaaagtcaggaaacagcaagttgctggagaggatgtggagaaataggaatgcttttacactgttggtgagagtgtaaattagttcaaccattgtggaagacagtgtagcaattcctcaaggatctagaactagaaataccatctgaaccagcaatacccaaaggattataaatcattctactataaagacacatgcacacgtatgtttattgcagcactgttcacaatagcaaagacttgaaaccaacccaaatgcccatcagtgatagattggataaagaaaatgtggctcatatacaccatggaatactacgcagccataaaaaaggatgagttcatgtcctttgcaggtacatggatgaagctggaaaccatcattctcagcaaacaaacacaggaacagaaaaccaaacactgcatgttctcactcataagtgggagttgaacgatgaaaacacatggacacagggaggggaacatcacacaccagggcctttcgaggggtgaggggctgggggagagataacattaggagaaatactaatgtagataatgggttgatgggtgcaacaaaccaccatggcatgtgtatacctatgtaacaaacctgcatgttctgaacatgtatcctagaacttaaagtataatttaaaaaaagaaaaaaaatgcatacttgattgagctagaaaatgtgcttgtctggaggtctctaatctgtgttgctaatacatagaatgacataatagaaagactatggaccgagaaaccaatactcagaccagctgcgattgagttctaacgccagctcttctgttaactcagtgtatgggttcttctccttgtggctccatttacccatttgttaaaaagaggattggactagattaactctaatgagagtatctttcagatcagaatacctaagggtttcttttctttctctattgccaaagctcatgtatttattaatgtattccacagatgcttattgaatgtcttctctgtatgtcaggcattgtgctatgtcatgcagaacaggcctgtaaacaaggcacacacagtccctggccttggggtcccttcctccagtgagaaagttgtgttccctcctactgggttgactataattttttttttaattcactcattgtttaaagcaagatcttagaggaatgggaagttattcttattgggagaattgcttgtcatcatagagttctctttgatgagatagagaaatttagaaagattaaactcctaaattgcatttccttgtgaattgttgtaatggaccagaataaacacaaatttggtgttttctagcattttagtgacagtgtgggtacacctcacattacaatgtaaatccattttaaaaatgcagttagtaacttatgttttattaactctcgtatttttagagtaccagagtaaactgaccgtttgaaggaatgcttcatatagtgagtcatattgtcatgtaattatgacccaacctatatttttatttcattaaaggacttttcttaatgcaaagcatctttaaacttccatgtaaaggagataattatattaaaatattcataaccacattttgacacagcattgctcgttttgttcctttgatctaatagtttgtagaaaatagaatgtaacaaattatctcatttaattttacctgagaaacaccgtactttttcagggtgtataagtcaggataagctggctatgatgctataacaaacaactccaaactctcagaggtttaaaacactataggttttcttcttgctcatatgacacattcatcttgggtatggatgaattggactgatcacaattactctggaacccaggctgacagccgccaccatctcaaacattttcatggtaagtgcaagagagcaaaaagagctctgagagggtctcactttggcaaagaattgtgtggttatatccagttataaatcactggctagaattagtcacatgctccatattttcacagaggggcaggaagtactatcctaccatctgcctaggaagaagacagctgggacacttgatgaataatgctaattactaccaaacacggtatggaagagttgttttcaggcattagctcccttaatttgctagagaatcaattaacacttggttagcttagcaatgtatttagttgaaaaaacttttttctgaatatttcaaagcactaacttttttgagaagatctactgcattgtactacatattgctggaattctagcaacatcttcaaattttagatttgtgacaatatttgtaatgatatgtattttatacttttgcccatggatattaatgacatttttactgtgattctcaaaagcattaaaaaagaagaaaggttaggtcatataaatggtatgattagttttgtttctttatttctttttcccttggtgtttttttagacgcagagttttgctttgaattgctcttccagtattattttgagagtgctctactagtgcttactcattttccattctaataacaattctaagccagaacaaataggaatttatcagaaaattatggtccactctcaactacttctaaatatcaatctcaaaagttcatttaataattcaactttcttaggtatagtaataaacaatgtataagtgccttttaatatacatcttaaagtattatttttatatttattaatacttgtattcatttataaatttacttatttaacaaacttttattgtactcatgtagcaggcattcaaactgatttagtggtttaaaatatatttaattgtatactaagaatttatgagaatttacaaatattttctttttttttttttctaagtaagtttgttgtgctttaaaggttgtacggttctattcttccatatgaaactgacaatacaaacctaaaaatgggaaatacattttggactacatgtccagaggcaggggctagactaccttctttcctatggctttttgcagaagaatgatacatgtatttggaagataaatggcagggaggtattagtgtaatatattgctgtcaaatattctgggattcatactttattcacttaaccagccaaaagtgactatgtgtttacagtgggtcttatgatttggtaaggacttaaaatataaagattaagacatgagccatattctcatggagttcacactcaactgggggaaatagatatgccaatatacaattaacaagtatataatgtaataagttctatggtaaaggtatctactgagcacaatggaaataccaaccaacctggaggcatcagtgagatcttccaagaatggaagtgacattcgattaggtcttggggtgaaatacactggggaagaaaggaaggagaacattgcatctataacaagcaatgcatgtataacaagcagcatgagtgactaaatgagtgaacatgtgaaaaaatgtgcacctggaggactccatacatgaggtgtgcggtgcagtagcaggaaatgaggccaaaggaaaacccgggtctggacaggacgggatcttggcttgagtttgcctcaaataagaaaggataggctaaaggataagagaggagaggctaaagagcttctggagaggcattaactaaagggattggaatttatctagtaggcatctgggatcattgaattgtataaagcaagagtgacatggtcaggctgttatattcaggaaaataagtaattgtagtgagagacagagaggaataaattagagacagtgaagcctggaggcacaaaaacttacatcttggcttcatcagcttaatttgccagtgactagacgctaggcaattgagataggtgactaatttttgtactttaatttataatattatgactatgtgcttagaaaatgacacctggtcctttaataacttgattgctttttctatataaaacatctccattaaattttctttgaagtaccaatgcattttctagaaagcagaagacatgttaatagcagcgattgcctttctctgctatgaacatctatgtggtactaagtagttatttaggcatctctattaatagacagtaataggtatgctggggagatttctaagggaatcatttcatgaagcaccttatatgactttaataaaaaacccattaatgaataaaggaataagttgatcaagtcacacatttgtagccaccagcatagtttggagaatgatatgtagtggaagtgaaatgaaaatgctgagagtgatatttattccaactatttccgaagtagaatatgatagtccctgaaaatattcagagaggatggtgttatcagcagtatgagctgtttttgagaaatcgagaatgtaaatgagggagaatgattcatgccaaaattgactaactccaagtaatcatctctagaatgcttaagtaggtattttgctatattcctgtagctataacaatatatcatttgaaagattttcagaaatgagcatcattatcaataatgaaaaaagtaggtcataatctctttttcctttggacttttaaatgccaagtcttgtatcttatgaatataaaatccattatctgtgttaccaagatatatccatcattattgcttctctctgttttgaaataacatcatttttcctaggcagactaggtagattctggtataaaaaatttggtaatatattatgactgtgcatttattggattttatgtttattttaaacttatatgttttgatttttaagtttctaaacatttaggtcccttgcactttcgcatagaagtgtgttttaatgcatatgccttgtggtcagatagccagttgttttgggaatcagtttgccatttagacactcagtcccccaaaaggccgggagaatattccttcaaatggcccactgggcaaatgtgtacacttctttatcttgccatattttggagaggatatttttttgtcaattgggattatgcatttgttagagcctgtgagttcttgggagatccgtgtatcttagctttttgagttttagaattttttctcggtataacattttaaaggttagattatttgggaagaggtgtgataaagctgaatatattcctgtggaagaaacaatttgtaatctggattagctttctttgacggaaagtagttttggccaaaaggtgacaatattcttcaactggtaagtgtggaattggatgagagacacaatcaatctgaaggtgtatgctgtttaccaaaaagtagactagaaatggaggaaaatgaggaattaaattctatctaatatactctgattcacttagtgtttctgcataactatttctggacattattttcaattttttcctttatttagatgcagttccactgtaactagtcttactacaagcaagccttttcagtaaagagaggagaaaatatactctactgttttttatttctttggaatcaaatgtttgttgaatgctacattgggccatgcatagagttgaacatgacaaattgttgctaaagaaaattctagactggtgaataatttgtcttgaatgttttttgattgcatttaggtaaagttgttggagcaaagtgttctgttggctgcaaatctatccattctgtttgtttcagaaaaacccagggctagccagctttgagcattagttaattgacaatattaggaaaaaaaatcagctccagaaccatttccattgattgggaagacacacagaattattccttaaagtggtcccatttccatagaaggaaactgaaggtaaatgagtgacagaattgcttcaacccacagataattatgaatgaatgtagatttactaatgtaggtactcaaactcagtgactatgtttatattgatatataaaatatatatttatctttatgattttatgtataaaataatatatactgtattttatagagtaactgatttttagaagagacattttggttggagaaagatgtttagagtgagacagctgggtttgaataaaacttcagtacttagtatttttcagctttgaatctcagaacaagagtttctttgaatgtacaatgggagatgaaagtacatatcatgcaaagttgttactatatttgcaaacttggacacaatagacacctaggaattggtagttattatccttttgctactaatttatgtttaacaaatattccagcgctattgtgatcagaagactgcaggaaggtattgtgggaaaaacactaaaaggaacaacacaagatctctctctttaaaggactttgatacagtttttgaagagacagacacattcatacatccaataaatcttaaagaattctaatctaaagcatacaaaacaatgcaaaaccattataggacataaatgtagcactgggtttttttttttcttttttctcttgagacagtcttgccctgtcacccaagctggaaagcaatggcacgatgccggctcactgtaacgtccacctcctgggttcaaacaattcccctgcctcagcctcccgagtagctgggactgcaggtgcatgccaccatgcccagctaatttttggatttttagtagagatggagttttgccatgttgatcaggctggtcttgagcttctgacctcaggtggtctgcctgcctcagcctcccaaagtgctggaattacaggtgtgagccactatacctggcctggaataatttttatgtcaccaagatggaaattttagatcacggttgccctcttttccaatttctacttagagatttcctccttacatgtggcgataataaagtacttttaataaactaaaaaatgttcttaaaaaccattatcaataattatgatgtgatcaatgacaataaatagactatttgtaattatcatggattgcttcaacctgattctatattaaggtctcattgttatttctaataaactactgattgctaaagctgcatttttaagttggctcattatataggaaatattcagatgttaacataactataggtgctcatagttgatcactctacaatgcttgggtgttgccattcccttctccctgggtcatggcagacattacctattaatcaaggcatctttgtttctattcattgcagtctcacaaaccttctcatgtcagtgtgatatggtttagatttgtgtccctgcccaaatctcatattgaattggaggagggatctggtgggaggtgaatgaatcatgggggtggaatttcccttggtgttcttgtgatagtgggtgaactctcacaagatctgatggtttaaagtgtgtggcacttcccccttgctctctttctcttctgcttcaccatagtatgatgcgcttgcttccctttcaccttccatcatgactgtaagtttcctgaggcctcctagccatgcttcctgtacatcctgtgaactgtcagtcaattatacctctttttttcataaattacccagtctcaagtagttgtttatagcagcataagaacagactaatacagaaatttgatactgggggagtggggcactcttataaagacagctgaaaatgtggaagcaacttttgtaactgggtaatgctcaaaggttggaacagtttggaggactcagaataagacaggaagatgtgggaaagtgttgaacttcctagagacttgttgaatggttttgaccaaaatgctgatagtgatatggacaatgaagtctaggctgaggtgatcttagatggaaatgagaaacttattcagaactggagtaaagttgactcttgctatgttttagcaaagagactggtggcattttgcacctgccctagagatctgtggaactttgaacttgagagatgatttaggctatctggtggaagaaacttctaagcagcaaagcattcaggatgtaacctggctgtttctaaaagtgtatgctcatatgcatgggcaaagagattatctgaaactggaacttatatttaaaagggaagtagagtgtaaaagttcagaaaatttgcagcctggccatgtggtagaaaagaaaaacccattttctgggtagaaattcaagcctacttcagaaatttgcataaggaaagaggagctgaatgataatagccaagacaatggggaaaatgtttccagggcatttcagggaccttcactgcagctcccattacaggcccagaggtgtaggagggaaaaatggttttgtggacctggcccagggccctgttgctgtctgtagccttggaacaaggcaccttgcatcccagacactccagctccagctgtggctaaaaggagccagggtacagctcaggccattgcttcagggggagtaagccccaagccttggtggcttccatctggtgttgggcttgcaggtgcacagaagacaggagttgaggattggaaacctccacctagatttcagaggatgtatgaaaacatctggatgtcaaggtagaagtctgcttcaggggtggagccctcctggagaacctctactagggtagtgtggaggggaactgtggggttgaagctcccacacagagtccccactgagacactgcccagtggagctgtgagaagaggaccactgtcctccagaccccagaatggtagatccatcgacagcttgcaccatgtgcctggaaaagcctcaggtactcaatgccagcctgtgaaagcagatgtaggggctgtatgcagtaaagccacagtggcagagctgcccaaggccttgggagcccaccccttgaatcagcatgccctggatgagagacatggagtctaaggacattattttgcagctttaagatttaatgaccaccctgctggatttcagactggcacggtgcctgtagcccctttggtttggctgctttcttccttttggaatgggagcatttacataattcctgtaccctcattttattttggaagtaattaacttgtgtttgattttacaggcttataggcagaaggggcttgccttgtctcagattagactttggacttggacttttgagttaatgctggaatgagttaagactctgtgggactgttggggaggcatgattggttttgaaatgtgagaaggtcatgagatttgggagggtccagggatggaatgatatggtttgggtttgtgtccccaaccaaatctcatgtcaaattggaggcgggacctggtgagaggtgattagattatgggggcagatttccccttggtgttcttgtgatagtgagtgagttctcataagatctgatgatttaaaagtgtgtggcacttcctgcttatctctctgtctctcctgcccacttgtggtaagacgtgcttgcttcccatttaccttccatcatgatttaagtttcctgaggcttcctagcaatgcttcttgtacagcctgcagaactgtgagtcaattaaatctcttttcttcataaattactcagtcttaggtagttctttatagcagtgtgagaatggactaacagagtgtttcaggtagtcacagccaactagtttgacttgacacatgtgataggatctatttttcatcccatcataagcatttttgagtttgagaaagttcacactcactatgttaactgaagctaccttgtagccctgtaaatctatttttaggaaacttgatctactagttataattctccctttttcttctggtctcattatatgctagaattccttgattatcaactctgaaaacatggcagaatgcagtggttcacaaatattggtgtgcatcagattcacctgaagacttgttaagggatttctgggtcccactccccagagtttctgattcagtaggtagcaatattttaaacaggtttagaaagcttttaagagatataaactcaagtgatgcctttggtgccaatcatggagccacatttggagaactactgacataatgaaaagaacatagacttaattacagagaaaaaagcattgagagcatcattactagattcttgaaactcaattgttttcaatgaagttttcccaataataaagcctgtatcatggaattacttgaagcattacctgagaaatatttcaaatatttagcagtaataacccctcagtgaatgtacattcactgtactttttgtactttgtgcactttgtaataaaaaaatcagatctaacattgttctatgtaccatagggaaatggagatggcgatgtatagttcttgttctttcttccatgaactgttgttacatattctaatcttcagaaactcactttgtgttatcctatacagcataccatatttgctctttgctctgaaaagcttgctttaggcactaaggagaaagttttacttttttactttgagtttggagaagtgcacaaatggtaatccagcaggtaactgtgtataaaagctgtggagccacattaggctgggatttccctctttacaggtaatatttttaaatgaatgtgataatacttagagcatattttacatcctgcaaaggagtatactattcaaatatttgtgccagattgcgttgtaaatgcagcaccatttaattttaatttaatttaatttttaatttttttttttttttttttgagatggggttttgctcttgttgcccaggctggagtgcaatggtgcggtctcagctcactgcaacgtccgcctcccaggttcaagtgattctcctgcctcagcctccagagtagttgggattacaggcgcccaccagcacacccgggtaatttttgtatttttagtagagatggggtttcaccatgtttgccaggctggtctcgaactcctgatctcaggtgatccacccgccttggcctcctaaagtactgggattaccagtatgagacactgctcctgggtgcactaccatttaattttaaattttcacttattagttcacttgaattgccctgaagaatacttggtccgaacatttacatctatggataaggcactgagaaacagaaagcctgaaggaatttctcaaggatgatgaagaacctggcttaggtttgatctcaaaacacagactccttataaataattcactcacttaggtcattctcctccatgattgctcttcagtttaccagaggtttaatttgtttccccaagtattttcacatgcagattctttatatattactgtatttttgtgcttagtaatcttaataaaaatatcaagagtactgtttaggaaatatgttatctatggcaaaatagttcttaattataatgtagtgtttttggacagtataaatgatagcttagaattgaaaagagaattactatgcttaccataaatctccttgacaacaagttcaatgttttgaatactgaatcatttagaattttatgcagatttataggtctctcaccttggcatctcattccttttttatacatctgggattttaacagatgtataaaatctgttataattattactgctttatttatccccataattgttactgctttaacaaatatttttggccgtccaactcatttgtatttgaaatgtttgcctagtttttactatcatcatcatcatccatcatcttcatctttcttcaatatttattgagctttgaaaaactgtgaaaatcaacttcaaagaacatcttgattactttactgaaatgaaggtccttattggaaccctcactccagaaaaaaagaagtgattcacagattctgggtcttctttctaagggatatataatgtcagttaggcagttaccatcccccaaactgcttgcttctcattttgtaatgaaaagaaagctctctcagcatatagtattctgtacagattgccttcctgcctttggcggagctcctgtttctctgtgaatcattccttggtacacagtgttaccattgtgttatctgaaagagcgaatcctgctgggtggtggtgccgctactccattgggaaggtcacaagttcatgtctgctttgccttctgtctagtgaaatgtgttcccactaaggaatagagaattgcaatatttttctgcttatggaaggtcaggcgttcagtggtaccctagcagtgttggctaaaaggccatcaatagtggcaaattcaaggcaaggcttaatcttgcctgttgtctatcattccacatgtttttttacacctcttctcagtggctgaaaaatgaatttgcttaaggacttggttgaagtgactgaggatgaagcaggaggcccttaatgggaccctggagtgaaagcgcttgcagtttaactaagtggtctttattgattaagcaggcatttattgaacatcagctctatgccagacactgctttaggtgctggagttactgaggtaaatgaaacaccaaaggtctctgttgtttcagggcttttattctagtggaggtgtcaggcaatagcaatggcagagagtgagtgacagaagctgttaggagattaaagctgaggaaggtacgagaaagggcagggctgttgttttacatcaggtcattagggacagactttctgaggagaagacgtatgaacagaagagaaccatagaaagatctagagagagagctttccagaaagaggtaaaagcaaacagatcctgaagtgagtgtgagtcgccatgagacgggtgccacaaattcaacatttgtttgaaataagaatattttgttgataatgattatacacatctatataaaatacatttgaaaacacgacattatgcacaaaaaaccatcaccacttttaaaaatatgtgtatataatgaaggtataaaataatattttctgtcataaatttttccccagtagagccatcatagggttaaaacaatatgttttatacataatgtactgtaactgcttttttaacaactgaaaatgtacagaaaaatggtgttttgactgtctatctttagtcttcagctgttgctgtcacgattcagaaatttggatctctgccttaagaagcacattttcttagctataaaaaaatctgatggaatctacaactgtaatcataggctgtgactttagaatataaatcacttgttataaaaggggggtgttggtgtttcttttcttttcatttgattctcatttgtgttctcaatatgctttactttgagtttgttcgtatttggatgaagataaaattttccttggcttcagtgtgtggcaagcagtgcccatttattttaatagatactgtaccaactaaatcccaatatgtgtcaggaaattcagaaaactgaacccagaaatgatgctagacacagatagaaaggaggacttcaaaaattcctacatgttactttggtgattggtgtgaaggagtactttatagtatcttctaaaagtacagttactttcagaaaaatgagaaaaatttaaaaagattaaaaaacacagtatcattagaatttggtctcttgcctctaaattttctaaattaccaaaaataaaataaaagaaatttattggctatagataatatagcacaaattggataattttaaatctcagacatgtaaaatcagtacagatttcacaccaaaacactatttgtagcaatagtagccatgagaattaagtatctgacctgggaggccccaaaatatcaatctcaggtgtgtccgttagaaggtaaaaaatctggaaatagaatcctgagatgatatttctacctataatacttaaggtaaagaaaaggaggtacataagaaacgtttctagattttaacacaagagacaaataaattctttttgacatgaaagacaaataaattttgagttgcaaatgagtgaacatgccaaggtacgttaaactaatatactttcttccaaaactggcttaagattggtaaaagtgcattcaggcgaaattatttttaaaaattactcattaataaaattttgctaatttttgttgcttattcaaattgctttgtgttgtcctgaaatatgaaattatggagaaacaattctagtttcaggatacaacttaattggagttaataggtttttaatacagtgtgttgtatttatgtgtatataaatatggcgtattcatgtttccttttttttttttttgcaataaagtatagtggattaaagcctaagttttgaagtcagatgtttttgggttccaatacttaccaactggttgaccttgggtaattcatctaatgtttctgtaattcagtttctttatccgtaaagtgtagattatacagttcaaagggggtattataaggttaaatgtgataatgtgatgataatgtatataaaattaactagtacatagcaaactctcaataaataatggttattatctcttagttcccagtggttctctctttctctttctgccttccccccaagaaagggctggaactgattcttttctcatagcccttagaaagaactaactcagctgatgccttcatttttggacgtctagctcccagaactgtgagacaataaatttctgttgattaagccacccagactgtggtattaccaagaagtactaaggtagtgctgtaaaaatactttaaaatgtggaatttggaatttggttggcagagactggaagagatttgaagtgcttggtaggaaaggtctagattgcctccaggagactattgttagacttatgaatgttaaagatgtttctgatgaagtttcagacagaaataaggaacatcttcttggaaactggaggaacggtgatccttattataaaatagaaaagaacgtggcctacttgtgttctagtttctttgtgaaaaatagaacttataggtgatgaacttggatatttagctgaggagctttctaagcaaagggtcgcaaacacatcctggtttctccttactgtttatagtaaactgtgaagggacagactacattgaagaaggagttgttaagcaaaacgtaaccagagtgtgaagactggaaaaattctcagcctatctacattgcaagaaatgagaaaacgtgttctggagagagcatcaaaagtgtgactagacaatcatttgctacaaagagaagcatgtgactcattaatccaatcaaccatctcagcaaaagacaggaatagatatgtgatcatccaggaaacatctgtgaaagaccctcttgtctggtggtttggaaccctgtgaattgcacaggaggccaacaagatttttgagagttttctatcagcagaaacactacaaactctgactgaaggtgacagaactgggatgaagtgaaggaaaatggtcagacttctgggattctacaagcaggaaatgggttgattgaactatctggctggttgataatgcagatagtttttaagaaaagagaagaatgatccagaaggtagtttagaggccagcagagctgcttctgtcatcattggtccagagagcacaagcctggcaacactggggccatcgcctcattggttccagaaaaataggaccacctccttggtttcagagggcaggtctggccactaatgctcaggttctagaaaactggtgccaccccattcatgggcccaaaggacagaacactgagccaaagaggattattctcaagcctcaacatctaatggaatttttcgtgctaggttttggacttatgatctctttcttccttttggaataggaatgtttgtcctgtgcctgtcccaccattgtattttcaaatcagataactcattgtctggatttataggtttccagatggagaagaactttgccgcaggatgaatcatacttcaagtttcacccataatcgatttggatgatttaaatgagatttgaggctcagagttgatgctggaacaattaagacttttggaggtgttgtgatggggtgaatgtattttgcatatgacagacaacgacatgaatttttggggtcagaggatggacgtttatgggtttgtgtcctccccaaatcatatgttgaaattctaacccccagtacctcagaaagtgacctattttggagaaaagatctttacagagattataaagttaaaataaggtcattaaggtgggtcctaagccaacatgactggtatctttattaaaaacggtaattgcaacattgagacagcataaagggaaagccatgtgaagaggcatagggagaaggcagccatctataagccacggagaaaggcctgcaacatattcttccctcacaaccctcagaggagccgattctgctgacaccttgattttggaagtctagcttccagaacagtgagacaatacatttctgttatttaaaccacccactcatttgtactttgttatggaagccctaataacgtaatatatactattgtgtatgtcagaggttcagactgtattatcaaaaaggatctaatttatattgtataaggatagttgaacgagtatagttatttaggatggaagagaaaagtattaaagaaaatatctttgcagggctatatatgacccaggaatcctacatttgggtattttccatagaggaatgacagcttatattcacacaaaaacctgtacacggatgtttacagaagctctatttataattgagctcaaaactagaaacagcccaattgtccttcagtgggcaaataagtaaacaaactggtagagacttacaatggaatgctatttggcaataaaaattaatgaactattaataaatgtacatcttagctaaacttcaaggacattgtgctgaataaaaacttgatcttagcagtttaaacgctatatgattccatttatatgatatgattgaaaagacaaatcagtgatggagaacagatcacagattgccagggattagtggtggcaggaaggatgtgactataaaggtgtagcagagaaagttttctgagggtgacacaactattctatatcctgaacatattggtaattgcaagaatatctatgtgtgtcaactttcatagaaccctacaccaaaaaaggtgaattttatttcgtgataaattaaaaagtaaaacaaaagagacaaaaatagtaaccagggaagctttcaaaaaatatatgttcttgttcaagaccagcatggccaacatggcgaaatcccatctctaataaaaatagaaaaattagccaggcgtggtggtgggcgcatgtagtcccagctattcagacggctgaggcaggataattgcttaaacctgagaggtggaggttgcagtgagccgagatggtgccactgcacttccagcctgggtgacagagtgagattccatctcaaaaacaaacaaacaaacaaaatatatatatgttatctttaaaagtctttgctaaaactctcagcatgcttacatatcaaatgtctcaagcctttgattttacatatgtaatattgcagtgttttgattatatgaaatattatattgaagtaaatttgattaactctaaatttaattttaaatttaaatttaaattctaggactttatagcaagtcttgacaaataaaattctattttcttcgttatgaactaatgagccatcatcattaatgttactgaaatttttaaaaattctaatatgaacagatttaaaataaacagactatgtagtgaaaaacaaatcttgaaattaagtcagctgatcttgatctaacctaccattttggaagaattttctacattgatatgtattatgtacccttataaggctcatagtagtaaaatattaatttaggaaaatattgtctctgtgaaatagcttgtgaatgtccacttaaacacataatggatctctgcatattgttctttttttaagagcagtggagtggatttgatttaatattaatgtgtgctatactctatgatctctgtagtatcacagttaactggacttatataggcaattatttacatttaaaattttacagtgtagattaatactatgttatttttttcttatctatttcagacaagactactgacaaagtaggaaataataaaaagataaaagcttattttagagaaagaggttttcccaaatataactttgtttctaacagctatgtccttaatattttattcatttgaaatcacccttatagacaatttgctgacaggttaatattatctttgggaactggagtaccctcttttagtgtggtttttacaacatctaccatgggaacagcttccccttccatttaggtatctgactcatccttgctaatatatcttgatttaatgatgacctagggaagaaagagaggaactcccttagtatttttattctatgtaatctgccttctcagaatgtgccttgtgaaagaagcacctaattactctgctaaaaccagaaagcactgtgaggagaaagcctggcaagtttctcctaccagtctgccacctaatgaatagaaattgcaacacactggtattctgcttttgcactgcggcaggaatgtgaataataataattattattattaaaagaacaaagaaatgttagctaaaatggtaaacatagataaactgctgtgatttaagaagtttccatttggaatcctctgtaagctcaagtataaaaaggatattggctgtaatcactttcaagacagtaacaaaaatgcagggctaatagcagggcatgatttgacgtgccaaatttatttttctttcatatatttaactgctaaatattaatcaatcagaatacacaatgtcagcctctgaagatacaaaggtgaatacgatagtttatgtccttggagagctcatagattaggccaggagacaaatgaaaaaaagtaccataacatatcacaaaacattctgagggagacagccaatgctggtggagtacagatggatgaaacagctgactcttcttatggaagttgagaaaaaatttactgaagagttttcctttgaatttagccttaatggatgagacatgacatgcttgacaaagatgatagagaaataacacttcagacagtgaaaactgcacaaaataataaatatacaacattttgaaaatgctactgcttaatgccaatatagctcttactctaatttgagagaaatagcttattccattttgtttgatccctcctcctttgtcttattctgcaccaaggcgatcagttatttattcattcaatgaatatttgtttaaatacctactatgtagcaaacagtatttggggagctgagattacaggatcgaacaaacaaagctctgttccttatgaaagttaaatttcaggaggagtaaacagatgataacaaagtcgttaagtaatatcgactatgataaacaagtaattaatattatacgctgacaagtactatggagaaaaatgaatcagaataggggaggtcggtaggtttaaacagggtgattatgggggacttcatgaagcaagcgatatttgggcagatgctgaaggagatgagggaacaaaccatgcagatatactgggaaaaaggaaacttgaacaacattttctgtgaacaaaaaggaggccagtgtggctgaagaagaactagggggagagttgaagaagacgaaataagagaagtactgcagttggagatggggaaacctcatgtagggacctcaaggccactgtgtagactttgcttttactctaggtgatgaggtgtcattggagggctttgagtaagcaattctttcttgaatgggaccatctctaagaaacatgaaaccatgctcaagcatctaggatacaagcctcccacctaggattcaggtgactctatcaggtagtatgggctaaaactgatctttctgaagcaccattttcctaaagatgagtaattaaatagcatcatatggataaaagtgaggtattcacatcatcttataaagatatcatgctagataacttcagactcaaggatgttaagtatatgtgaagatgaacttctagcaatatgactggatcaccgtgggagcatgaattccgtcttctgtcccataaggtatcctctgttataaaaagcttggatagcattggtgaagtataataaaatggacactatagttagagtggaaagacctggttttgagtattggatcaactgcttaaaagctatgcaattttattttttgatttatttatttttttttgagatggagtctcactgttgtctgcctgggctggagtgcaatggcacaatctctgctcaccacaacctccacttcctgggttccagtaattctcctgcctcagcctcccaagtagctgggattacaggcatgcgctgccacgcccagctaatttttgtattttttagtagaggcggggtttcaccatgttggccaggctagtcctgaaccccccacatcaggtgatccgcccgcattggcctcccaaagtgctggaattacaggtgtgagcaactgtacccggacttgcgtcttgatattcttatctgaaaatgggtataataatttacaaataatgtacatttggtctacaaatatttattgactgtctactctgtgccatagtctatcccaaattccagaaatacagtattgaacaagactcagcccagcccaaaaggattttatatttcaaacagggaatttcaacagtatttgtctgatatatttatgaggatcaaataaagtaatatattagaaatgcttactgccatatatggcactcagtaggaatgcaaaaaatgtaagttacatctctataattcttttaaagagttgccagttaattttctaagagagctagataaccatttttattcagttgaatattatcttcttttcaatcatgttagaataattctctagcttcgttttttaaaacaaaatataaaaattgggagaagttgcaatttgggggttgctgtagttatatataacagtatatttactgttatatactgttgtataacagcatacactgctggaagaggtatgttagttcattggtgctctgttaccttgtctttgactgaaggaagggatcttgtatagctttacttgaatagagtctaatggttgtgtgttgttttagaaaaaaggaaccagctagtgaaataaataaagacatgatcaataataattcaattttattaatattgatagtcttaaatctgttcctcttttaaagatttttttttaaaagcttctggattgtctttttaaaaaaagcttcttaattcattgtcttctcaaatatccagctttgtatttacaataagtgggaaccatgttattttgagtgccatgttgtgctaggtataatattattgtatacaaactgcagttttgtccatttaaaatacttttgttttataatagttgaaaagtagttactcgtagaaaatttattccaggtcaacttttaaagtttgaaggatattgaatataaaaagtatgtaattattttcatccaaaataattgtattacaaagatgttgaattttaaaaacattttaaaccaaagttatcatagtgtcactataaatttataatatttttggctgtaattaattgacctttcttttcaattcaatgaaaatcaaaatgtttccatttttccacaatatttataataagtaatgcattatttaattgttattgactatataactattcaaatcctttaatgatattttattatgataaattattgattcttattgctttgacaggatgtgaatatcagaaatttcattatttaaaactgagacaggctgggcacggtggcttgcacctgtaatctcagtactttgggaggctgaggcaggcagattacatgaggccaggagtttgagaccagcctggccaacatcgtgaaacctgtctctactaagaatacaaaaaattagccaggcatggtggtgggcgcctgtaatctcagctactcaggaggtaggatcgcttgaacccggaggcagaggttgcagtgagcctagacagagccactgcactccagcctgggtgacacagcgagacactgtctaaaaaataaaataaaataaaatgtaattgagttataaaaaataaataaacctgagacatacctttaattggatttctcaaataattctcaagtatctgtacattgataaattaattgggaattactcatttctccttctgaggtgccaagggctaagggttatacatgaaccggaaggttttcattttattcattagttccttcctaggcacctgacagggcaaatagattctatttgccttttctcctgttctcctggctgtctctctcaaatagtatactttgctgaaatatagcataggatttatttttactgtgcttatgtttactttttcttagatagcattggctatttcctatcttgtaggctcatctttgatttcaatatttggcaaagtgtctcatttttttttttttggcagtttggctctaaaaacaaactttcctcctcttgccttaaacattttttttttcagaaataagtaattcagactttcaaagagtccgattatcttttaaattttatatttcaattggctgtctttggtattcctatcttttttctagagtaggtagaattaacagactttacatatttttgtgaacatcacatcttagaatgattctcaaaatttctttacttgggaacttggctgtcatagtagggaaagtgaaaaaagtaatgtggaatcccacgtgatggcacataatttggcaataataattggaaagtaattataattgcactattgtactgctttaggtaagtttatgtcaacatttctttatctaaactccagttcacatatagctatatctgggttgtgaaatttgctgtaatatttttagaaagaaattcctaaaatgcttactatattttggcagttttgaaaagtaaatatgagaagtatcttttgtaacttcaaattgctggggttttttttgccaatacatcactatgaataatggcaaaatcacatattttcatgtcccagttttaaatcatattattgctggaggaaagtcccagctttgttttcataattcagcaaataataggtagcttatagccatattttctcctgtgacattactaatagtttgtcttctcaaatagggcagttaaaatatctttagatattaaaacatgcattagagcctacttgaacaaaattacaattttgtaattgaattaaagatcattccattgggaatcaaaaaacctgggttttagttttagctctaacatcagcagctaatatgattttaggtaagttgcttaaattctctagctctgttaccttgtctttggaatgagaagctgaacaaggtgattactaggattcagtgcaaatctaaaattctataactgtgcttttgttcataatatattttagttaattattgaaatgttctgctttccagagtagtaccgtaaaccagtaatttaaacccttcctactatgtttcaaccactttcccaagggctggtatgggtcttacttgctcctacatgtaggagttagtctgctcttatttagtcctttagatatttagcacattttagcctgaatatctgacacagatgaatgatttttttttttttttgagacaaaggcacactgtcaccaaggctggagtgcagtggcgtgatcttggctcactgcaacctccacctgcttggttcaagtgattctcgtgcctcatcctcctgagtagctgggattacaggtgtgtgccgtcaagcctgggtaatttttgtatttttttaaggagagacgaggtttccccatgttggccagactggtctcaaactcctggcctcaactgatccgcctgcctcggcctcccaaagtgttgggattacaggcatgagccaccacgctcagcccaaatgattttataagcgtagaagacatctctcacatcttagtgggagaattaaatgtctctctttttcactgaagtcttaccgagaatcatttcttttctgtcactcttgctgatcttgctgatgagccctagttctgctttgtcaaacttatttgagatcaggctggcccttgtgacaatcattgccggtatagacttttcataacatccagaaacttcaagcaccactatattgtttctacttcctcatatgccttttaaagtatagaagctgtattccaatatatatctacatgttaggttacagtgatctgcttttggacttgaggcattttttggactcgcctgtccgtaagtctcacttgcattctttgtgaacaaagaatacacccactctcaaatgtatatgcccacacacaagcatacagtatcttgtacacctatctgcacacacacaaacacatgcatagtgcttgactttggactctgtgctttaactgagagtattcatttttcctggttgttaccttcattccagttttgtgagctttgctgtcaaagtggctgtgcatctagcatagagtggctgctgttggcaacccatgaacaatgagcttaaacagaagaatgagggtaatgtttattgtaataaagattgggcattaaattccttgggggaatgaaccaaatccaatgttttcctgttcgctgacattttttatattgatgctgttttggatcttctggagaagggaggaaaaaaaaacttcagcaaatcagctctttcattcaaaaatggaattcagaaggctattttagctagctttttttgacaatcctggatttaatcagtttttactgtgatgaagacagttagcctcacaaattttgtggaaatctaaagcgatgaagggtgttgttaagggggaaacagagtgcaattgtttaaataatcctgggccaatagcatttggtaggtggagttactgttgtgtgcattacagagcaagataattctgaatgaagactttaaacattacacatgctggacggattctgggtctgctctttgtgcaaacaaaacaagtgactaggttttgcttactatccattagtgaatgcagcttgtttaataagattttttttaaaaaaatgcatgtaaaggatttatcaaaagcctttatgaatatttcatgagttgatatattcagctgaatgaattcagtgagtgtcagtgtgtagcttgcagacaaacctcatccacaaggaggctactgacattggaagcactttggcgcattttcagaggcaaagccagcctgataaagctccttgtgacagcctgacttgctattcttcgagtatgctgctcttgctctaagacgctcatacattggagtcacagcttcgtaaattaaactggaaatagtttgcagacttatcagtcttctgacctgcagcagtgtctctgctatgtttgagatttttgttttggatggtgaaagctagcactccttacaagacatgacagcaaaagattcttcaaaggaacttactgcttctgaacctgaggtttgcataaagactttcaaggagcaaatgcatttagaacttgagcttccgagattaccaggaaacagacctacatctcctaaaatttctccacgcagttcaccaaggaactcaccatgctttttcagaaagttgctggtgaataaaagcattcggcagcgtcgtcgcttcactgtggctcatacatggtaagataagacttggaggtatctacagtgcttttcagattctcgcattagcaccagtgatctagcagtgtagaaaatggaacatttgagttttgttcctaaaacatactgcaagtgtgaaatgaatggagaccaggtcagatgaagagtacataaatgcactgtgtgctaaattgtcattgtgctactagctttttccagataaaatatgcttttaactgtagagtctttaaaattactgcttatcagaatacatagctaattctaggtaagtcgagtaataaatgaatttttaaagtcagttttttgtttcatatctgttgaggtggtaggtgacttttttgttttgtgattgttagtgattttaaaaaaataattttgggacatgaataagtgttttaatcttagttctaacttatttttaagataatgtataaagtctaacttaatgtattgtaccatcatgtttatagcatataaaccagtgagtttttgatttattgacttatctttacaatacttaaggaaagggaaaactaagttcccacttctgaaattgcatggtcagttactttaatttttgattccaaaatgctgttatctttaagagcttctttttttaaaaaaatggactttaaaatttatagctattttttaaatacccagcaaataaattcaagaaccctctgtaaaacttgcactgagcctgccacctttaatatacatgtttacaaggtatgtaaatatagtagggtaacgtccttaaacagtataatgatgaaatgtaaggaaaaaacacgatgaaattaaatcacttttactgtgaaagccaggccacttcagatttttttggaggctatattttctttcagattaaggtacctttaaaaattgagtagctgtaccttagttttttctagcagggaccatagcaatatagggagcatgtacattttaaaggcaattctaacacagtgattttgtgactacatgctgggttgccaatcaacattataaattgaggagatctgatttttaaaaattaatattcacttgaattattttctacttatctaaaatgtttgtctgcttaatctactgtatagtgcattggcaaattaaagttacgcctagaaatatatagcttgcctttgatagataccacatgcttagccaacacatactttgcctggcatatatgatgtgcttattcttgctttctgacaatggactgttcatataatggctttattgcagattttctttggtcatcttcttgatgtattacatcatgttgtttaattgtaatctcttatttgcagaatacacgtggttagtctttcaaagcctactaatgatggtaacattgtataaagggaaggtttatgtataaggatgtactgacttgaagaagtcctctcttttgtgctttatcccacccctaacatgtatgtattttcttatagtttgctgagtagtataactgaatagggaagatattagttatgaaaataatatatacagaaaatacacaattaatagatgcacattttttcttgagttaatattaaattgctattttaaccaaaaggatatttaattttagatagctaatttttagataatgataagtcttcttaaacccttggtaatatttttctttatgtagagttttggttctgaacacaatagtgtgacctttctttttcttataatagatttttgatgtgctaagaacatagagctataaatactggagttttttacttttccaaagaaccccaattttaaaatgattaaagagctagttttactcatgcattatacaaattttctggcagcaaaaggaacaattaaatggtatctgaagttacctacgctaataagatgatattcttttagttgagttaaaacaaaatgttacaattgccaaaaaaaataggactttgatataatgctctataatatagattaaaataattcattaatcattaaacttgtgaaataactttagttttgactatgattcattttcacccttttttctttcaactcacacattccccttctgatgtttcttagtaaaacagtttcacagtttgttttcagctcatgactaagtctttatttatatttatttctattgttttatctgaatacatgcttaacatttttcaaatttattttcatacaacatgcaatgaaaatctctttctagaaaatagacatgtatcttacatatttttatgactttttcaaatcttaaaaattttgcctttcccggggaaccccgataaagtctctagcctaatgcttcatgctttccccttgcttcgcctttttgtctcttgagcaccctaacgtctttccaatgaatatagatggctctgtatggtctgctctacctcctgtctctaagactcgtgagaataataaacttttctttcttgagtttccaaaaaatttcatgtgcttttttacatagatgaaatggttatatgaggaaataagagcataagtactttatttttgcctctttgtcatagtgaaatgtaaccagcctttcacgatcaacaattggtatttttccaaaccatgcacttaagttagaaattccaagatatgcacttagaagtctctaaaaacatgttattactttacagtagacagtaggcttcttttaagaagattggattgttttgattccagcattgaaattaaagtaattttcatgatgaagctaaacaatgcagaggatgcagtttatatgcaaacccactaaacagtttttatttgtagatttcatatttcagtcagatggatgtgtagttctggctttaaaaacccaaattatgaactgtggactaatggcagaagatttaagaaatatttatgaaattctgactctgggctatttaaaaatatctgggggaaatgtggatattcaatgtgttatcactaatcagagtatttacaaaatcctaaatctggaaggaatttggatgattatctcattgcttccttttacccttgggcaggaccacaattactccatctttaacatatgggaatctgccctacttttaagactctagagaaaataattctaaaatctcacttagtatacaatcttactactttatagtccaggtactagaaaattatttgttatgatttatctatattatttatatattatatataatcttttttcccctcagtggatattattaataaaaaagatgcgtaagagcctgcatgaatctgaagatcattattaactggtgccagcgttttctttttcattcactcaacatatgtaattgagcactgctgtgagcaagaagagaaaaaaaatctgattcaacccacatgtattccaacacctactatattttaagttttttactagaatgtctgcatatgttatcccatttaagtttcatttggaatataagtatactccaaattcatgatcctttcaatattacctgctgcagatatcaaaagtattttgaattgctctagcttcttataggtgtttatactccattcatcattattttgactctgaatcactatctcaaatttcaaaatttttctttgaattttgaaacccaaaagtggataccatactctttgttagacgatatgagaaaatatagatatgaaacatgtaataagttgcaaagtgtcaatggaaccttcagaattactgaattggaaaattactgccagagttctcaggtcagcatagtatttatccccaatcccacatcagggatgacaacttatgaagcacagtgttatcctacttggcctgtatggcctgcctgtgcttgcctggtacttgtcacacagtgtccagcttttataaccttcccttctttgttgatatcccaacttcagtcgtcagttctctttcatcattagcaacttgatgctctctgaagaaagctactgcaatggtcttgaatatatcctgggcccactgcacccccctgacccacccccgccccccaccctgctgcattgctgctcctttttggagctctcttcttgtatttgtgaggactaccctctatctctctgtccatgcttgcacacaggaaacaatatttttgtaattagaagttagtaggagaaaagaggcttgtattccttcttctcgtttagttttacctgtatcttggaaatcttttctcgttttaacaaaggtttatgaagtctttacttgtctatctaatatttgaatacaaaagttttaaaagccatagttagtactctaaagggacttatatttggcaagacaacactggattaagtggagaataggaaaaaaaacagtgaatatggcatatgattgaccttagaactgccgacatgcttgctgtattatacaacttagtcctagtttgttagctaactctactgaatctgtgctagtaatattgatcaattgccttgaattctatcctggtaatattggaaattttttgagagatgtctgtctttacatgtttattgattcaacatttgtttgaacaaaacagttgttaagagcctactatgcaccaggctctgatctgggcttaggagacacaaaatgagaaaaagcccttgtcttcaaagaactcctatactagctggaagacaaacttatgcaataataattaaccaatggtgtgggaataatgctactgaagcatgttgttcaacttgtcatgagggcacagaagaaataactaccactagagagtgagtcaatgtgttaagggaagtttcgagaagagatgacatttgtgtggggttgtgacaaatgaataggagttttctaggagaaaagtgggcaggaaaggtattttttggccaagggagcaataattaggaaatcctgttaacaaataataacaataatagctctaatatattcagcacttatataatgtgttggatattaattataaatgtatttactcatttaagcatataaaaccccctgagttatatactattatattattttcattttataggaaaaggaataaaggtcagacaggacaagtaatttgttcaagtttacacagaaaataaacagctgagttgggatttgactctgagcacgagtgaaaatacacatagttcactggggtttcagcctaaggatgcaaggtgggaaagctaggaagtaagactgtgccagcagattggagccatttgctagggcttccaatatcatgaacaagagttggagttttagcccatccattctcggtgaggagccacgacaggttatgagaaggggattgccatgtattatttttattttggaaaggtactttgcaggtcaggtagagaatggattagaggacaaggagcttaaaggtaactggaaaagggacaatgtgcatttgagagataatgacttctacttattttgtatatcccgtaacattgaaaactatgcatatgacatgttttatgacttaacaaattatggtttatggaaactgggaggaaagcatgtgaacttggtgtctcttgcatttatcacttacaccatgatgctgtagatagtactagctggtacaatacccccacatgcatcaaacaatcagcaaaggtgcataggaggatgtgtgtatctgaggaaaaccctattagctcagtcctaatttactagaggtgctttgtattttactttaagtgcagactcctagtgggttaaaaaaaaaaaaaaagcagatattatcttagtccacaatctgaatcaaatggcagtagaaatctatgcctcatagcctgagtctgttgctttaatcagagcaagcattttatcagtacatctataaatagtgttttcctggccttttagtgtcatcaagtcttcaatatattggatttttaaaatacttacagtaaaaagggctttgcaaagtaatggtgacaacccccaggacacatgccggaaggtggcccagcaagcttgccagctgcctttctgctaaaggctaaacccattttgctaaatcccacttgcgttctctttccattcctttctgttttgttatctctcagtttttctccttggatgtttatagtgcttccttctctaacatcactgtcaatgcacttgcaacattatgctagaagcatttaagcgatttcttagaaaaaaatctcaaacgcttaccatggttttcaggccctacattatctggccccaggctgcttccaacctcctctcctgttctccagccctgtgagcctgctttctgttgttcagcaaactaagcctgtattcacttctggcctttgcacttggttttcttctgcctggaagaaaagtacctggatgttaacacggtttctccttatgtccattcaggattctactatctccaggtatcactatccggagaggcctttgctgacctccctatctaaaatagcaccctttcgccttttacttccttgtctttttggtacttattattacctgaaaatacattatagacatgcttatttgttatattgtcttatcctttcatcatctgccatccctgctaaatttcatgagggcagtgattctgtcttgttttcagtatcctcagagcatacaagaaaggcagtcatttaacaaatacttgttgaagaaataaagaatgaatatggtttctgtttcctgctctttattctatgagcatttttcctatagcttgatatgatggaaatggaaaggaagctttgttgatacttactctataagcattcttctccaatcatctctcaatagctgtgctctctttctgtcagtagagctactgcagcttgcttcctatattgtattctatgatattgcaggtatagatttaattataatatctcactagagcctaaatgctttacatagtagcctatttaattaagtcaccatgtacaaatcatacctcctagtctgtagtgctgtaaagtaaatatttgtctgtagcactgtacaattatttatttggtttttcttcattcatcaagtagcatggttggtgcatcagctcaggaaagctctacatatctctcaccaaatgcctgaggagaagtgttgtatgggggaatctacttgttattttgccttcaaaatatttacatagtgtacattagaatgcttaattatctatatttttccactgatgcaacatttacaatattaactctagcagcagctacagcaatttgagcttttaataggatttccccagggaacttggaagtaagaagtctatgacttgcagagtgaggaaattgcaagttaataacccttgtactctagaaaagacgtcactgagagggaaactgttcacttggttctgcctcattttttctttcctgaactaggaggttggggacctctgtcactggtagtaatttgtttgacataaatatgtttgaataccactgtgtactttaggttgaaatgaaaaataactcaacttctcaggttgcttcttcctggaacttagggagaatgaggatgactgcttctcaaaacctttgtaaagagaatgcctatgagatgatgtgctcccttgacagaccaaggcttgtcctcctcttccaaactatacctctcaaaactcagctttattgcaaactatgcagattggaagtcaggggatggaggatagtgtagcttcaaagagtgcttctttcaaactgtattttctggaaaatcagtgatctaggagccatttggagattcctcgaaaaagagggtggtgatgatctgtttcctggttctcggtcagaacaaagcaacatggatgattatatgcttggagaattttggaggattctcacacaaattctataatctccaagtacttgaaaaccaccagtttaagagttaaatgagtagagggagaaaagaaatctgtttagttgtgcttgataaagtcacagacatttccagataatttataatattaaaatcatcttcatctaatatgtccaggaatggcagcaggataaatgaggaggatgaaagcaactgtgggtcagggagacatcactggtagtgaacatttaaaatttcaaagttgaaagaatagtacaatgaacaccttttacctagatatactaattgttagtggtttctcttatttacctctttgtctctttctgtgtataaaatcatatatatgttttctttatgttgaagagagcacatttcgatggagagcaatagttttgggatcaaaagaaaaatattatttattttaaaacagtttccatgtatcaagcttgctgttattacaattcatccgtgtttttgcatttattagtaatttattcccttttattattaggtggtattcctttgtattgggtgtactacaacttgtttatctgttcaccaactggatcaaaatttggatttccagtcttttggctattatgaataaaggtgatataaacattcatgtatggttttctgggtaaacatatattctaatctttcttgggtaaatatcttagagtggcattgatgggttgtattgtgaagtatatgcttttttggttgttatttgtttttatttttttgacatggaatcttgctctgtcacccaggctggagtgcagtggcatgatcttggcttactgcaacctctgcctcatgggttcaaactagtcttgtgcctcagcctcctgagtagctgggactacaggcacgtgccaccacacccagctcatttttgtattttttgtagagataggttttcaccatgttgcccaggctggtctagacctcctgggctcaagcaatctgcctgcctcaacctcccaaaatgctgtgattacaggcatgagccaccgtgcctggcctatagtatatgctttactttataaaacactgccaaactgttttccatcatggatgtcccactttatagtcttactagctatatatgagagttcttattattctgtatgtgtgagggcattttgtattgtcaagttttttttaaattttcgtcattctaacagataagtagtggtaacttactgtgattttaatttgtgtttcccttatgactagtaataccgaacatcttttaatgtctttatttgctatccttatctctttggtaaaataaaattgtttatataagtcatgtatcaataaactttgcaaatattttaatttttaagagcacactgacatattggcaagttatgaatacatttgtagcaccggtttaaaaaagaaaactattaaaatatagtagagggctaaaggcatctatcataacatgatttttcttgctgataaattattggttttcatttcttaaaatggtttctaagagatgatgtctataagattcaaattttcttcctcaagaaggaagtttttttaaaaaaataaatctataataattttataatatatatgaaacactatataatgccttaatgtagtatactgtagaacttggggttctatcactgtataattttgacgttgtctggaatttatttttcatggtgaatctttgttttatgtgacttcatctggagttgagaatgctaggttgggtatcagtattttaccttgatttgctcttgaaactttagatcaatcctagaactaatttaattgtcctagacctcaattctttaactggcaaaatggagaaaagagttttatattcagatatttgcaaatgttaatttaatttaaaaaatatctacctagactgtgagttacctatttcttgagataatgtattaaagtacttagaacagtacttcaagcattataagttgtttaatagatgttactgtttaattatctgactaaatctctaaacatacacaaacattcatattattgtcagggttggttggtaaagcaggaactagtttttttttattttttgaaaagcatcagtatgtatggactgtgccaatttggaagagtcaaagtgcatgtgggttagtaaagaagtacatttataatatccacagtgtgacaattcagtatactaagaaacaaagtatcattcatttgctgtcatgtaataatcatatcctaatgaaccaagctaaattatactaaaatgcactaattatcagaagacccagtgtgaatagcttacattcccgataagaaattttattgtcttgttttgctctcatcaatacatttaaaaaaaaaaaacatttatcatcttcactctgtgaaagagataggaagagaaccactttgaagtcattccatccacttgtaccaataagcttaaaagtaacaagacaaagcaaaacataagaagatgccttgtctatttcaggatccgcatattaaaagccaatataggattcagtgaacaaatgccttggaagaattccagtgtcatcaaacttatttatctcaaaacgtctccttccatcctttctgatcctctacaaaattaataagctgagactatttgttgcagcacagaggatctgagcatgcttctgtggcttatttctgctgtaattccctcagcagtttatacaggaattctttatctcaccatcaggattctttaggccagaagagaggtcagagaagactggacaaataaactatgggatctaagtctttcttgctaaggtcctaactgcccaagacttcctcctgagagtctactgttgaaattcatatgcaaatttcagtttcatgggattaaccctggctgttgtctttacctgtcagcctgctcagccaggtgtgagttcacccataaaacagtgtctttcacatgctcatttatcaaaacgacatagagactttaggatgccaggtgatatgatgcaaaaagcacaacatttggtttctaactgcatcttttaccatacactgtttttgggcaaaccattcaacctatcttagaaaaagtagaaaaattagaaaaattagaaaaactctacttgtatttcattaggcctttatgaagattaaatgaagtaatgtgtgtatgatggttagtataatccctggccaatggcaggtaataaaagcagtccttagttcactaatgtatcgagagcttatgattttgtgtaaaatttatataatatgtatcataatgtaaactacttaaagatctttataacatggtttaattaaatcagtttcattgagcaaatgtggtgcatcttaaatccattcttttagaccacttagatattacttagtttcataggatatgactttatcataaagcacatattaattatccttaccacaataaaataaaaagtaataaatccttatgtgttatggtgtgtaatcactctcattcatcacagagaccattccaaattgcagattttgaccatagaataatcttttttctttaaaattccagttaccttcttgaatttgatactttctccattagtgaaactattaatagataccaatgaagcactgttttttttaagttaacgtaaaaaacatttaatggtcttttcaaagtgccagaacatctctgaagttgttttccttagtgggatctaacctcctagtgacttgtttatatcagaaagtttattcatgagaggcagtggaaaagcacctagggatctagattgacagaatctagacatgtttcctggcaccaccacttacaaactgtttatttatttgtttatttatttatttattttttgagtggagaaggagtagttctttaacctttgggagcatcaacttcctcatcagtaaataagagataaaacaatatcactgatttctctacttatatgattttatatgattatataacatttacaaatattaattagtatggttgagaagcatgggaaaagaaagataaagattactttacagaaagtaagggtactccatcattaaaatataaaaatcaaagagcttgacttaagtgccgcaggtgtatttcggtatatgtaaagagcatcccattaataaatattatcaaataccatacacattgctccagatttattttataaaagggggaagagtttctgctttatgggaccatgtaagtgagagactggagacaggagacagactaagtggtaccttaagatctcatctaccccacgggtctttatatcacttttagcttcctgcagaaagataataacaagctcatataaccaatatataatgaagtgaaagttgcctttattcagacaactttacagcatttaaatcaaattgctctttatttcttggtcatttcaaagaatatttaaggatgaaaacaaaaataaaggttattgcttctgctttgagaaagttttccttctcacataatctttgatcaggctattgtgtcacttggcaacttaaaggcaggaaaaagttatatctttaagtccagggattctatttaaatgaattgccattgaaaagtggttattcaaatcaactcacagcttagtaacattgaaaaataaagtaaactacttttgggtttcacaaggatcatgccaagtttctgggtctgtctaaattaataaaaataagacttaggaacctgtatggaaattgtagattaaattaagcaactgcttcatctgaataaagctttgcagagtctaatattatgaaggagctatcttcatgaatacagtgcttgcttgggattcaagggatttgagttttaatgccagctgaatccctaatgcccacggagcacatatgcattcatttgatgctggtagcttttctgtcaagtgggattaataattacctgctctaccacccttaccttatgtattatagtatgaatattcaataccagtgttcacggaatgctctgcctttctgcaaaataacatggcagaagcatttagaaaggaaaaaaagtttctaaaaaagttttatgcgtatcagattttcaaaaatgtgtctcagctttaaaatacattaatgaattttgtattttatatgaaccctaaaaatgctcttgccaagtacttagttatctgaaagctaagataattgttttgggtttcttacagctttgctgcatttgtgtatgttagtcctttgtcaatggataaacaccagattgacatcgcttagtgagttaactctgatgggtggctagtattttcgttttttattgattacaaccaacagatatttattgctggataatgcaaacatgaggcaccatgccatcaaggagctttaatctgggtaaggagagtatatagtcatttggcatgtcaaatgattaatttttcacagatacaagtgttaagagtatatcagtatagccaggcatggtggtttgcacctgtaattccaaccacttgggaggctgaggcgagaaaattgcttgaggccagaagtttgagacaagcctgggcaacatggtgagtgatatggtttggctgtatctccacccaaatctcatcttgaattatagttcccttaatcttcatgtgtcatgggagggacctggtgggaggtaattgaatcatggaggaggttcccccatgctgttctcatgatagtgggtgagttctcaacagatctgatgactttatgaggggcttttccctgctctgctctgcacttttccttcctgcaatcatgtgaagaaggacgtgtttgcttcctcttctgccatgattgtaagtttcccgaggcctcctcagctatgcgaaattgtgagtcaattaaacctctttcctttataaattacccagtctcaggtatttcctaacagcagtgtgagaatagactaatacagtgagactcccatctctacaaaaattaaaaaaataataaattagccaggcatagtggcaagtgcttgtagtgcaagctactcttgaggctgaggtgggaagatccttgagcccagcaattccaggctttagtgagccctgattgcatcactgcactctagcttgggcaacagagtgaaactttgactctgaaaaaaatatataaaagtataaaatacagggccaggcatggtggctcatgcctgtaatcccagcactttgggaggttgaggcagggggatcatttgaggtcaggcattcaagactagcctgaccaacatggtgaaaccccatctctaataaaatgcaaaaattagccaggtgtggtggcaggcacctgtaatttcagctacttgggaggctgaggtgggagaattgcttgaactctggaggtggagtttgcagtgagccgagatcatgccactgcacttcagcctgggtgacagaacaagaaaaacgaacaaaacaaccccccccaaccaaaaccaaacaaatgaaaaacaagtataaaatacaatgctctcccactgctaccaggtggaaatgatctaattatgaaactacaggtttgaagagcaatggttccacttctttttccaaatggctgtgagccttgagtctgcccctgttatggtgacatactgagcaattaatcagtagtgagctatacttgagaatctggtgtactagcaataggctaggtagtctgctgatgtgagcaggtaggaaatatctcctaagacagagggaaacaaattcgcattttaatttttttcacataaaaattaggcaatgatagaacaattacatcatatatttcttatatcatttagtcttcatctccatttgcagatgagaaagttgagactcaggaaggtcgattaattgataccaggtaaacaagctacaaagaaataaaccaagatttagtacatgtgttctgatttggagtaacacattttatatgctgacaaggtccatagatacagaggtatatcattacacaacccgccccatcccctttgcaacttccaactcccagctcctgtgggaaaatatccagggttactggattcacatgttcccttattaaaagcttcctcccaggaaggcttgtaaaattcatttgctcttacacataatggactcatggggtttaatttggggagaataaaccattaaactagaagaattaatttctacttacagaatttggcacattagagagaagagacaaaggggagtattttggaggatgaaaggttatgttccaggcatggaacatagacgatgggctgaatgtccaggcatgtcattgtatttgcaaaccattcattcactcattcattcattcattagcattgtcaaccacctgcttgattgtgcccatttcctgcctttcctgtttctatagatgaattatctgtgtacctggttaaggccaccccttactgtgcactgcattatatcagtactcacccacaagggctttgctcttgcacttgtccccgctgtctcctgtatcatcagttttccattctattaaatggtatccatttataaacatgctatttccctttaaaaagccctctttgacccgaggcactcctctatctattgctgtatttcatttctcccttataagcaaaactctcccaaataattgtactgctctactggtttcctctcctccagtcatcttctggaaacttctaaccaagttttctcctcacaattccactaaaagtgttcttcctgagattatgacattccatgtgccaaatataatgaccaattccttcacttggcctccagaacactgaatgtctttccttcctcatgggcttctctttctcggttggttcctcctcatgttcctcaagtctaaatattggaatgctccagagggttgtggacctcttcatttttgtcctataataactccctaggccaagtatctcaatctaaataacatccgtatgctgatgcttcccaaatttatatctctagccagacttttcctctgaactctagatctatgtctctctccagcagccttcttgacagccaaaacttagcacatccaaaatggacatcatggctttctcccccctacaccatgcccttgatgtaacatgttccaaatcttttccattgcagtaaaatgcaattcaatttttctaattactcaggtcagaaatcttggagtcttgcatgattcctgtttttctctgatatttcccatttcaaatgcatcagcaaatcctatcagctcaacattcacaaggaagcgagactgtcaccacttctcatcaccagctgtcgctgttctgatccaagtaaccattacctcaaacctggattatcaaattaacatcttactggatctcccttctttcattctttcccctttacaattaattcctcttgtagctgccacagtgatcctttatattatctgatcagttgtttcattcctctattcagaatcctttaacaacatcctatttcactcagagtatgggtcaatgtgcatgtaccatgcctacaaatctaccctggtctctacctattacttctccaactcctttccttcccctcacaccatcccagccacactgctgcacttggttctcaggctaagcaggatttcttatcaagacctcggccttttcttgttgtcaagaaaaaactttctccagatatctgtatgggcttttcttttcttatttcaggtggtgtcttgaattcatctaattggagaagactttttggccatctataaaaaatagcagtgcacatctttgcctttctaccatcattatccctgatttgggttctttatagcacctgatgtatatatctacatatatatgtatttttctatatctacatctatttcatatccatatgatctgtatctttatctatctatctatctatctatctatctatctatctatctatctatcatctatctatctaatctttggtattgtctgtctcttttctctctccaattagaatataatctccatgaagacaaagaactttgtctattttattcatttctaaatcctcaaaactagaacacatggtagcacatggtaggtagttaatacatatttattgaatgaataagtgaataaatagacaaatgagttgcagactgtttgggtaccttccagttttaagcactgaggccccatgttgaatgggagagggaaatgtgaacagataatttaaaatattatgtgataaataaaatagtaaaaataactattgcctttcaaagtaattttatctggaaatataaattttaaaatttaaaaaatattatataaaatttaataagagattattttctttataaagagaaagaggggcatttggcaagtatactaaacttaatagcaagaaaacttaaattcatattgtgattacattgtttactagctgtagaatcttaggaaaataactcatctagtctcttcctcccattgtacctagtatactatctaatttattttatagttgtgaagatttagtcagataatatcatacataatgggcattaagtagatattatttttatttctttccatatctaatactatactttacattcataggttaaccttctgtgatctgtcttattcctctgcaatttttcaatgactttctaaattcccacttcattgactttcttccattttcttcctgtgagactttttgacatcatgtgatgccatactcagcctcatcatccccacgaagattaatcatctttctctccttgcttcaacaatattgcatgtgatatttagctctatttctatggatggaagcaaggagagaaagatgattaatcttcgtggggatgatgaggctgagtatggcatcacatgatgtcaaaaagtctcacaggaagaaaatggaagaaagtcaaggaagtgggaattttgaaagtcattgaaaaattgtggaggaataagactgatcacagaagtaacctatgaaagtaaaggaatcatataatgtgtactcttttgtctatttttttcactcatcagaattactttgagattcatgcatgttgttttatgtatgcatagttaatcctttttattgctgaacactattccattgcatggatataccaaaatgtgtttattcattcacttgttgacaagcatttgtttttatgtttttttgctattacaaataaaacattcatctgccaaaaaaaaaaaaaaaagaactggtgagttctttagctctatttctatggatggaaagctggattaattttcaacattgtaggacagtaataagtgaatatttattctttaattggaattatgtttctttgagttgcttgtcactaatacgtagtgaatcaatggaaatgaaaaggacactcataaagtaactgcatagtgagtacataaaccaaaaccatggctatctttttaccctgtgctacagcaaggctagtgaaacaagagcaacatgaatatttttaagaaagagtatcacaatggtaaattttatttgtagggcattatgtagaagagaaaattttcaggaataattatattagactcatctctttgatgacagacactatttcctattcatattgcaaaataattggcaagtacatgttttaaaaaaatgagtgttttttttcctgtgagacatctgtattttactacaggtgggacaaagttatttcggtccttattttgccactaggatattggcaggcagagggtgacaaaataatgtaacatctgaaatttcaggctatgaggaaactcacatacatacaatttgtcagacaattaggatatttctaaaatgtgaacagatgtataatagaaattagcaaaatgaaaaatgacctttttttgtttttgatggatacataaagaatttatatgcagttttctaggttagcctagttaaaacctcttctttctacatattcagttaagaaataattgttaattgagaccaagacattataattgtttcccttttgtattataataatgaaaaatatcaagaattatatcttataactttttacacaggtccaagtgatgttttctgaacttgcatgccacatttttttagccaagtgttcaccagttgggaactcctaggggttgtttatttttcagtgaaagacaatcttttaaggagtttatgtcctaaatattttctggttttgcagtagcatacatcagacatagtcattgtgtttggattgggattttcacttttaacatgttctcaaattctctaggcgtttaatgtttccatctggtcctcataaaaggtttcacatttgtaatgcagctcaggctcctactcagagagcatcattataattctatccatgactctagtttgatagagcagatacttttaaaactttggatttgttttttgcttttgtgttctgtcttaaacctaggaataacacttgagtttaatggttgtttctctctgaaaataatcatagtgtgcacaccatgacaacaggctcacaccccacttccttctgtgccgtttgaagctcctagggcagaaggagtaaccacattgtgagcccagtatgaggaaacttagcagtcgtcttactttctcttcattaaacaatctgttctcagtcatcacagatggagaggatattttcaaggacttgaacattttcttgaaatagccaaacaactaggaatctccttttgccatgttaaataataggttctagggcacaatttgagcaaagttcacagcttctagcaaggtctttttatgtagttaggtgtgcagtgcatgtggatttgtttagtgagtatgtacttaagtaacactatatgtcaggcaatgctctaactaaacttcacaaatagtaactcatttaatcctcacagtaactttatgaatacggtactattagtatccccatccaaggatgtagaaactgaggcataaggcaaaaagaccacagctagcaagtggaagagccagaattaaaacctaggtggtctggctcaagaatccatggtcttaactgtgaaactgtgctatgactgaatgtgttcagtgtcagattttcaaagatctattattatcttcccagaattgaattgcacactttgtgtaactctccccaacaccattcttgattcataattggtactcagtgaatgtttttttaccttaggatttaattaagagtgagtgaaatgataactgattttgccatcatttgaaaaaaaggcagaaccaaaggtgaatcataatggtagccagtggacaggcagtttttcattcagaagtgtcaatggatcccgttatccaaggataacctatatttaaggcccagatacttctaagatgatgctttggattctacattttcaaatctggaagaactatcttcatttcactaattgttctttactgatacagtttttttaaatttaagtgtggtgaaacacaacccaaaatttaccatcttcgctatttctaggtgtacagttcagtagtgttacgtaattcacattcttgtgcaaccagcctccagaactcttttcatctttcaaaactaaaagtctataccacttaagcaaccactcctcggtttttcttccctctaagctctcagaaaccaccactttttaaaaaaaaaataactcatccacctatggaaatttaggttgcttccaccttttggctattgtgaataatgctgttatgaacatggatgtaaaaatatctctttgagactctacttttatttctttggggtatatacccagaaatggaagtgctgagtcatatgataattctatttttaatttatttcccatacggttctccataatgactgtatcatttgacattcccaccaacagtgcataaaagttcactttctccacattctgaccaatatttattattttctgttatttttttctgatagaagttatcctaatgggtgttagatggcacatcatcttggctttgatttgtattttcctaatgattcgtgatgttgagcagcttttcacgtgattattggccatttagtatcttctctggaaaatgtctgtttaagtcctttgtacattttaaaattggcttgctgtgttgttgttgagttgtaggaattctttatatattctaggtattagcccattgtcagatatatgatttgcaaatattgtctcccttctgtggactggcttttcactatactcttgtgttctctgatgcacagaatttttacatttttatgtagcctaatttatctactttcacttttttgcctatgctttctggtgtcatagccaaaaaatcattatcaaatctagtgtcatgaaccttttcccctatgtttccttatagaagttttatagtttgggtcttgtgtttaggtttttgatccattttgagttgatttttgcatatcgtgtaagattagagtccaactgctttcttttgcagtatccagtatcttttgcagtatgttttgttggtacccagctctcccaacaccatttgttaaagaaaaaaaccatacagatttaagggaaactcagaccacatagctataaacctggagttcctctcatactttggtccaaaccataatagatttagaaagaatcacgactaaagttctcaactgggggctcttttctcctggcgagaacatttagcagtaggtggggacatttttggttgtcacatcttggggtgggagtgggggtagcagttgttactggaatctagtgagtagaggttacgaatgttgctaaataccctgcaataaacagctccctaaagcaaagaagtatctggcttcaaatgtcagtagtgctgaggttgaggaaccctggcctagagtatagggaagtacaggttatgttgtaggactggaaaattggggaatctcctttttttgccatttgagggcttgatgatcattgcacaggtgactacctaagtgtccaattattgactacttggtagttggttttttaaagatacctgaatttcatatacatccagttaggttttaacaacagaatgctattttgagcttaacttttgcctttaagactgttcttctcactttctttcaccataattttgtccatttatgcattcattttctcttttctgtaagaaaacaagtaaataattgtaggattgatcataagaattggagtcctattagactatacaataatcaaggattacagaaatgcctagagattgttttggcctagctgctcctcctacttctgagctacttacaggagaaagatgcccaattgacaatataaacatgaaattaattactttataataaatagttaatttataacacccaggcttgtgtttaaaattccagagcttggctctctgctgaactgagctggagtacacgacttcagcccaaagtaattttatattgggtgtttatggtcagggaaacttcgttgcagaggtcatgcttgagctgagacctgactggctaaaagcctcaagccatgagaacatttggaagaagagtatttccacaagaaaaaaaaaacagaaaattaaagtgcaaagatcttaaggtaggaataaacttggcatgttcaagaaatagaaataaggccagtgaggctgatgctctgagttactgaggataacagaagtatgatgcaactgctgaaatcaaattaatatttctttttccagaggaaaaggtggggggtgtttgattagaacttctcctggtataaggggagattctctcaaccttggacacctgaagttggcaggtgtgtaaagcattggttttgtattgcatggttggttcacgttatcaattactgtttaagtatttatttattcacttttcaaaaactgctaataattttctatattctaggcaccattatagggctaggcattggagaaattgagatgcataagacaaaatgcttatgtttaggagctcgtagtgtgcatttatggattggatagttggatagaactcttctaattattgactatgtgaccttgggaaagttattaaacctctctgtgtctgagtatctccatctctaaaatgagatatttattgcagttacttcatggagttgttgtgaggattaagtgagttaatacctttaaagcagcacctgagacgtaataaccactcagtaacttagctattattgttgtggtggttttacagaagcacaggaagagactcattaattcagtctcaaaggttagagagaatttaaaagaaaaggtgaagtttgagttcattcattaactcatcatttgtttgataaatatatatcaagtgcctactgtattccacatactacttttctgctacggcacatacttctttcttgctgcctggattatctttgacaccattattcagctgtcaaactttaacatccacatcatcctcttcaatgtaaccttcttcagtttaaggaagagtatatattagagataaaaattgtacaaataataatttagttacaattgtcaaccatgatatcaagtgtaatccagtcagtgagaggaaaaatgcaaggaacatctaaaaagtgtgaaagataaggaaatgtcttagctaagagatgcaatatatgagagataagaaatgcaaaatatcataagaaaaaataatcataatcatcaactttgtaggtttcccaaacttcttatagtttatgtatttatcttctaattttctaagagttgagcacttataaccaaaagggcttcaatgcttgcttttgagtcagccataagtggataaggagcaaaaggatgcagcttgctttcaacgccaagtcagacttgtgttggaggaggtgtttagggatgggttttctaagggagaagaatatgtagggcacctactgaaggagaagagtatgggctctttggccattcttgcagagaaaacaacagagtgtgggtgggataaggagcagaactaggctagaatagggagcattaggttggaacaggagggctggagggtagttctctggaattttgattgtgcctatataagcaattctttgcctttttttggatttacatacttgatgtcttctttcagactgttgaatattagagcaaacatttgagagcagagaatttattgtatttgtgtaaccagtatctctcattctgctgcatatatataaggcctttagtaaatgtttgctgaatttccctatcaatttatatatcaattaatgagataataaaatgagattggaagaagaggatcatatccagtagacctagcctataatttgttcaatattgatgtgtttaaaaattaaaaaagctacctagataaaaggccaaaatataacatgtagttatgacagtcagggtttatttagcatttctataagccagtagcctttcaatttattctgcatgtattcagtggtggtggtagacaactggttttgagtcaaaattgcatataggatcacattttcttgctaattcaactttcttagttctaggttggtaaatattgtagaaaaagcaaaatgtttcccacatgtctacagattttcttgctttaatagcttcatttgtgattttgggaaccagaatatttttaaataaaacaagtcatttattcctggaataagtccctatgccatgcatgtcttgagattagaaactcagctgagagcaactagtgattattccctgactacaactatttgtgagatacagaaatcttaatgatgataatccagtattagtgagatttttaaaaaatatatatatatatattcaagggtgctttccaagaacaatttatacctcaccaattatttactgagttgtatgtggaaattggaattaactggcaccatttatttcagttacattttgaaaccacttacagattgacacctgggtaactggctatattttatatagctctgcacggatcatagagttttagaggtagaagttagttttttcttttagtgttactcttgtaacaggatgtatttaactgtttcagcaaaaggaagacagacgtttccatctaaagagtatgtggttttaggccgggcacggtggctcacacctgtaatcccagcacttagggaggccaatgcgggcggatcacgaggtcaggaggtcgagaccatcttggctaacaccgtgaaaccccgtctctaccaaaaatacaaaaaattagccgggcatggtggtggcgggcgcctgtagtcccagctagtcgggaggctgaggtaggagaacggcgtgaacccaggaggcggagcttgcagtgagccgagatcgtgccactgcactccagcctgggcgacagggtgagactctgtctcacaaaaaataaacaaaataaaataaaaaaagagtatgtggttttgacttttataatacagtagattctgcttgaataaattttaagattaagtattttaatgtgctttgtgtagatacaacagaaatatcaaaggacaattccaatatgaggttaatattttaatatcttatatcaaaatatctgagcacctagaaactggcagtgacaattaacagcttaaatgattcttcaaataattcaatttaagggtaggatttggaaacaagtagcattatcagactgaaaataacaccattttataagaatgtctatggatacaatcttaagttagtggcgtatgccttttatatatttatccaaccattatcctctatgtgcaaagaatgtgatctaaagaatgtgttaaggcagataatacgtgtgtattataataattaaaaggttctgtgatacagactctgacctgaggataaagtactacaagatataataactaccataattttatattttataatgataaaactacctatagaatgaaataccttatatcttactttttgctgcttttgggttaattatgcacttaaataaatggatagagttcttacttaccgttttcacatttaaattcatcctgatatgatgacatatagttttaatgacctggttaatactgatgaaaactttcagtggcagtgcctggggccagtagtctgctgcatattttatttttatattattgcaataataacaaaagatattggtgcttcttttcacctacaaataatcaattaaggaactgaagcttaatttatttaaaaagcaatttttagaacaagtcgatagttcacatagagctatttaaatgtcccatgcaaattgatggaatgttctagcaaatattatttagaaaattattattattgttattctttttttttttttttttgagatggagtcttgctctgtcacccaggctggagtgcagtgatgtgatcttggtttgctgcagcctctgcctcccaggttcaagcaattcatctgcctctgcctcctgagtagctgggactacaggtgtgcattgaaatgcctggctcatttttgtatttttagcaaagacagggtttcaccatgttgggcaggatggtcttgatctcctgaccttgtgatccgcccccttgacctcccaaagtgctgggattacaggcatgagccaccgtgcccagactagaaaattatttttaatagctcacattctttgcccagtcatttcacaccggtattccataagagttcccttgcagccagaaacagaaaggattagattttaatatcatctaacaatattcttttgttgtttaatcacactttatagtgctaacccaaatctgatctggaaatctgttcagatccagtttgaggaactagttgagtagacaatactctcagagagctacaggaactaaatgtacatctcttgttcatttgtagacatcattcaagcctcaggcttggattcttcgtttaggtctgccagtcaacaagaattcactgggtggttactcatgacagagacctgtatgagactgtgtacatagaagtcaaagaaaaatagttactatcgacaagcatatattgatacatataggcacaatttttctttcaaaagtttgcattactgttgaggaaagtagacatctatatttttataatgcctatttgaaatttgtccaggaaattctgttgctggtcaacagtgtagctaggcctggtataagaacaggtcaggtacagtaggattctgattaaggcaggtgtctggcataaaaatagtgaacgttaggaaggtaggattcctggtatatagcattacttaaagaacactttgaactcttttttttttaatatactttaagctctacggtacatgtgcacaacgtgcaggtttgttacatatgtatacatgtgccatgttggtgtgctgcacccgataactcgtcatttatattaggtatatctcctaatgctatccctcctccctccccccaccccatggacaggccctggtgtgtgatgttccccaacctgtgtccaagtgttctcattgttcaattcccacctatgagtcagaacatgtggtgtttggttttctgtccttgtgatagtttgctgagaatgatggtttccagcttcatccatgtccctacaaaggagatgaactcatccttttttatggctgcatagtattccatggtgtatatgtgccacattttcttaatccagtctatcattgatggacatttgggttggttccaagtctttgctattgtgaatagtgccacaataaacataagtgtgcatgtgtctttatagcagcatgatttataatcctttgggtatatgcccagtaacgggatggctgggtcaaatggtatttctagttctagatccttgaggaatcgccatactgtcttccacaatggttgaactagtttacagtctcaccaacagtgtaaaagcgttcctactcctccacatcctctccagcacctgttgtttcctgactttttaatgattgccattctaactggtgtgagatggtatctcattgtggttttgatttgcatttctctgatggccagtgatgttgagcattttttcatgtgtctgttggctgcataaatgtcttcttttgagaattgtctgtttatatcctttgcccactttttgatggggttgtttgattttttcttgtaaatttgtttaagttcattgtagattctggatattagccctttgtcagatgagtagattgcaaaaactttctcccattcaataagttgcctgttcactctgatggtagtttctttggctgtgcagatgctctttagtttaattagatcccgtttgtcaattttggcttttgttgccattgcttttggtgttttagtcatgaagtccttgcccatgcctatgtcctgaatggtattgcctaggttttcttctaggatttttatggctttaggtctaacattcaagtctttaatccatcttgaattaatttttgtataagatataaggaagggatccagtttcagctttctatatatcgctaggcagttttcccagcaccatttattaaatagggaatcctttccccatttcttgtttttgtcaggtttgtcaaagatcagatggttgtagaggtattatttctgagggctctgttctgttccattgatctatatctctgttttggtaccagtaccatgctattttggttattgtagccttgtagtatagtttgaagtcaggtagcgtgatgcctccagctttgttcttttggcttaggattgtcttggcaatgcgggctcttttttggttccatatgaactttaaagtagttttttccaattctgtgaagaaagtcattggtagcttgatggggatggcattgaatctataaattaccttgggcaatatggctattttcacagtattgatacttcctatccatgagcatggaatgtttttccatttgtttctgtcctcttttattttgttgagcagtggttagtagttctccttgaagaggtccttcacatcccttgtaagttgtattcctagatattttattgtctttgaagcaattgtgagtgggagttcactcgtgatttggctctctgtctgttattggtgtataggaatgcttgtgatttttgcacattgattttgtatcatgagactttgctgaagttgcttatcagcttaaggagattttgggctgagacgatggggttttctaaatatacaatcatgtcatctgcaaacagggacaatttgacttcctcttttcctaattgaataccctgtatttctttctcttgcctgattgccctggccagaacttccaacactgttgaataggagtggtgagagagggcatccctgtcttgtgccagtttttaaagggaatgcttccagtttgtgcccattcagcatgatattggctgtgggtttgtcataaatggcttttattattttgagatatatgccatcagtacctaatttatttggagtttttagcttgtagggctgttgaattttgttgaaggccctttctgcatctattgtgataatcatgtggtttttgtctttgattctatttatatgctggattacgtttattgatttgcatatgctgaactagccttgcatcccagggatgaaaccaacttgattttggtggataagctttttgatgtgctgctggattcggtttgccagtattttattgaggatttttgcatcgatgttcatcagggatattgatctaaaattctcttttttttgttgtgtctctgccaggctttggtatcaggatgatgctggcctcataaaatgaattagggaggattccctctttttctattgattggaataatttcagaaggaatggtaccagttcctctttgtacctctggtggatttcggctgtgaatctgtctggtcctggactttttttcttggtaggctattaattattgcctcaatttcagaacctgttattggtctattcagggattcaacttcttcctggtttagtcttggactcttaccattgattgtgtggggattgtaaatggtgacaatctgttggtaccttggagagctcccaatagcctctatctttgatttgttaaggtgctactgaggctttttgttgtcttagctttaggcatactttataagctctgtcatcctggtggatctaaaaggtagttaatgcagctgtacttcaatttgctgtgttaggctgtgtggtactcggacattatctacattctgttaaaaccttttggccttcacaccagatcttaggcaatatttttgggttcctcaaagtttcctatgcactaaggaggatagataggcttatcagttcacaatgttggcacactttgtctccaggggaaagagcattttttggcacagacaaaagaagtattgccaagaacaaggtagcatatgctcagatccaattagtggcagagacaataaacacagtaagagttcagagaaggaagttgtttctgagggctatggaacaagtgaaaagctccatgcaatagcaggccctatagtaatgaaagcattcaggtggaagagggaattccaggtgaaggaaatggttaacaacattctattgatttcaattgaagaaaattacaaggcaaaatttttatttttaattagcctataatccacctgagggagaaaagaaccatgaaagcagaaaccaacattagatcaactaccatttatgtagtaaaaagagtaataagatatagtgtaaacttaataataatgtttaggagataaagccttaggaataaaggatctgtgttgggtagggttatttagggcactcttgatttcagttattattttgtttcttatattagtacttcattactatatgtgtctcaagtggagagttgaactcaggaaaacagcctcagaaagaaaaagaaaaaaaatactacatactgatctcagttatacatattttgataattaataatgtgaattgtttcaggcggtttattttttaccttttgtgctgcctacccactacttttcatattccagccagcctcttgactttggtgttctccattctgagagactgtccatacaagtatcctccattaatgtgaagtagagttgcttatacttacaaaaagtcctagaggatagaaaaacaatcaataatgggtgcaaataatagataaacactatttttgatagtattcagtaggtctcttaccaagttattttcagaatatctctaaaaaatattaatctagcatcactataccttagagttggaagtgcttcagagatcatctcatttaccccttactcaatcagatagccatccaacttgcatcacttctgtgattactaggttctgtctgaacattttcagatatggaaagcttgctacccccaaggaagccattctgctgttgaccaacacttagaaaggtattgcattaaactagaatttgtccctatgactttaaatagatttttccagtttctttccaaagaagctacaccaactgtgtcaattcatacgtttattcaacaaaatgtacaggtcatataatatatgcaaggaattttctgagccctacaaatgataacttgataaacatggatataatactgtcttctatgagaaggcagattcttaatacatttttttggatcagtaaatagatggatagatgaatctttttcaccattaaataatggtaaactcttgatatataggtaaagttggtgtattccttggtaagtgaaggatgtggaatgagcattttaatatcctaatatcctctagaatggtgatgtattttatttcatagcctatcagtgtaaaaaagaggcaaatacaatatttatatatttattttcaaattataaatatgaattacttaactaaagtattatgtatatgaactaaatagatgtttttaaagatttaacataagtatatatagctatatattttaatagtttatacagtgccctatataacccacaagtatgatttatagctttgttaattatttaaatatactgcctttctagaaaaccagcattttagttgtccattacatcttagttgttttcctaactggagtcaagtgatcacaatatggtagcatttaagatttggcttaagaacatattagaactcaccaagtttttcaaaaaataggctttgagacaatattaagaaacagagtacttcaaggaaagaagtgatagaagtaatttatgaaaaacaatttatatgaaagctttgtactttcaatataaaagtactatagaagtaaaacactataaagatggataaaaaggagaagtttgaaactgtcaagtaagctaaattccttatctctttacaagcctaataacccagttggaataactcatagagtataaatctgggatctcattaaaaataaatattttccagtaacacaatgatgcagaggcaaaatgtatgaaatagaaaataaaagaaagaaaataatgacttcatactcttcttacctattgtctgctatgccagtttggattaccacaccacaggtttagcttgagactgaactcataatttcttcccagactaatgtttccatgtgagtttcctaattctgtgtatggtgtcaccattctctgggtgtcccaggcccccaactttaaacttaacccctgttccccatttcatgactaattgtttaccaagttattttgattctctgcaatatccagcaagcaaattatcccatgtacttaggtacagtaaaaatttaggactgctaacaaccacaaaggtttgtgctttaagtttagttgtgagctctgaaaaatgttagagtattaagtgtcaaacttaagatggcaagtccattttcataatttagtttttagtttcaattttgaagaatctcatcaaatgtatatgtctcagaatacaaacctttaataatataattatttttctggtcagttacatgttttattgttttcttgatccttagacttacaacttcaaataaaaatgtaaatatctgcaacatttgggcaatattgctttataaatgaaactgtacatacaagttcagtttttcacttttacaaacctaggaaatgcccttgaagcatgaatgacagtgtttcctcaagaggttcacatcctattacagtagaaggcatggtcaggactcatgcctacactttcagctttgacccaccctggctttggatcttgggtaaatggttagtctcactcagaataaaacttatactagacttttcatgtcaatggtccctttctatgtctagctaacattgtgcctcatgtcctctattatccccatctggccctaattaggtgaggctgtatcatggcagcatagcttcgggattaagctctcaggcttgaagtcagattctttgggtatatgtccctgttctgctacctatggtaacaggacagaagcatttaatctctatgttttgttgtctgatttgtaaaatgaggtaataataacacttaatttatgggtttgttgtgagaataccacaggttaatatataaaagttctgaggactagcacataataactactatgtggttgctattattgatattcatataaagcactcagcaatgtgcctggtatatagtgtgtgctcactaaatattaactgttattctcattgccagactccacttcaatttctgtaagctttatttcagactttggtcacaaaacaaaatagatgaaagtatatcctcataacacaaatgcgtgttcttcacctcaacaaaccaaccaattatggcgtcctgagggagggtgtgtgcgtcaccttgcaatgttgtaacatatgcctgcaaaggactattctacaatacatggctcagtaaacttacgtttttcttaacagctgcaaactaagatttgttttgaataatcctattagtttgtgccagtgttactgtgaaagtgcatattcaaattcttggcctttgttttacctgttagctttaatgtattttactttttaatattataatctactaaaatctaaaaatatgtgtattaatctgtttcatgctgctgataaagacatatctgagactgggaaggagaagaggtttaactggacttaccacatggctgcagaggcctcagaatcatggctggaggaaaaaggcacttcttacatggcagcaacaagagaaaaatgaggaagaagcaaaagcagaaacccccgataaacccatcagattttgtgaaacttattccctatcacaagagtagcacgggaaagactggcccccatgagtcaattacctccccctgggtccctcccacaacatgtggaaattctgggacatacaattcaaattgagatttggattcagacacagccaaaccatatcattctgtgcctggccccaccaaatctcatgtcctcacatttcaaaaccaaacatgccttcccaacaatcccctgaagtcttaactcgtgacagcattaacccaaaaatccacagtccaaagtctcacctgagacaaggcaagtcccttccacctatgagcctgtaaaatcaaaagcaagctagttacttcctagatacaatggaggtacaggcattgggtaaatatagccattccaaatgggagagattggccaaaacaaaggggttatggggcccatgcaagtccaaaatccaacggggcagtcaaattttaaagctccaaaacgatccctgactttatgtctcacatccaggtcacactgatgcaaggggtgggttcccatggtcttgggcagcttcacccctgtgactttgcagggtacagccctccctcctggctgctttcacaggtgggtgttgagtatctgcgacttttccaggcacatggtgcaagctatcggtggatctaccattctagtgtctggaggatggtggccctcttctcacagctccactagacagtgccccagtagggactctgtgtgggggctccaaccccacatttcccttctgcattgccctagcagaggttctccatgagggtgccgcctctgcagcaaacttttgcctgggcatgcgtgcattttcatacatcttctgaaatctaggcggaggttcacaaacctcagttcttgaattctgtgcatctctgggctcaacatcaagtggaagttgccaaagcttggggattccaccctctgaagccacagcctgagctgtttgttggctcctttcagccaaggctggagtggctgggacacagggcaccaagtacctaggctacacacagcatagggaacctgggcctagtccacaaaaccaccttttcttcctaagcctcaaggcctgtgatgggaggggctgctgtgaaggtctctgatgtggcctggagacattttctccatggttttggggattaacattagactccttgctacttatgcaaatttctgcagccagcttgaatttctccccagaaaatgggtttttcttttctattgcatagtcaggctgcaaattttccaaacttttatgctctgcttcccttataaaattgaatgcctttaacaacaccaaagtcacctcttgaacagtttgctgccttagaaatttcttccatcagataccctaaatcatcctttttaggttcaaagttccacaaatctctaggggaggggcaaaatgccaccagtctttttgttaaaacataacaagagtcacctttgctccagttcccaacaagttcctcatctccatctgagaccacctcagcctgaattttattgtccatattgctatcagcattttgggcaaagccattcaagaagtctctaggaagttccaaattttcccacattttcctgtcttcttctgagcctttcaaactgttccaacctctgcctgttacccagttccaaagtcacttccacattttcagatatcttttcagcaacgccccactctactggtaccaatttactgtattagtcctttttcacactgcttataaagacataaccaagactgggaaggaaaaaaagtttatttagacttacagttccacatggctgcagaggcctcagaatcatggtgggaggtgaaaggcacttcttacatagtggtggcaagagaaaaataaggaagaagcaaaagcagaaacccttaataaacccatcagatttcgtgagacatattcactatcacgagggtagcatgggtaagaccggctcctgtgattcaattacctctccctgagtccctcccacaacacatggaaattctaggagatacaattcaagctgagatttgggtggggacacagccaaaccatatctgtatgtgattagataggaagcttgctctaagttggtagaatgtaatttaatgcaagagagtttgagttgaaacagtttgagataaatatgatttatattacaaatattttacagcaaactttttcaatttgtcattattgaaaatgtttcagataaaaatgaaagatgaagagtctattgactcttttttcttaagctaaaatagacaataccaatattaatttatatatagtatgtatgaatgttacttttgctttttgatatgaaatataagtcatatgttactataataataagcactactgacaaagtttcttcttaattgtaatctttacagcataatgaattcatcttcctacatctagacatgcaataatgaaatattttaaatactgaatttaggatgaatttgattttatatatgcttaaatttgaaataaccactttcaaatttctcacccagtgattataacaataaatgatctttgctagatatacaaaggtactttcaagcaatattccttttgttgcttaccacaattatgaagtctaatttcagaaatctcagattaagtgggatagtcaagcatagtgacagaattggtatttaaacctggactgcttcaatgcctaatctgttgagggtttttttttttttttatcatgaagggatgttggattttattgaaggctttttctgcatctattgggatgaccatatggtttttggttttgattctgtttatggggtgaatcacatttatttatttgcatatgttgaaccaaccttgcattccaggaataaagcctacttgattgtggtgaataaaccttttgatgtgctgctggacctggttttctagtattctgttgaggatttttgcatctatgttcatcagggatattgacctgaagttcccttttttcagtgtgtctttgccagattttggtatcaggaagatgctggatttgtaggatgagttagggagaagcccctcctccttgactttttgaaagggctttggtaggattaatatcagttctccttgcatgtctggtagaatttggctgtgaagccatctgttctggggcttcttttggttggtagtttttgtagttttttaaattactgattcaatttgtgaactttttattgttctgttcaggtttttgctttcttccttattcaatctactatttgactcagcaatccactactgggtatatacccaaagaaaaataattatatcaaaagacatatacacccatatgttcatcgcagtgctattcacaatagcaaagacatggaatcaacctaggagcccatcagcagaggataggataaagaaaagtggtacatatacaacatggaatacgatgcagccttaaacaagaatgaaatcatgtcctctgcagccaacatggattcagctggagaccattatcataagtgacctaatgcaagaacagaaaaccaaaaactgcatgttctcacttataagtgggggctaagcatttaatactcatgaaagtaaatacaggaatgatagaccctggggaccactagaagagggagggagggaagagggcatgagctgaagaaccatctgttggatattatgctttctgcctgggtgacagggtcattgggaccacaagcctcaaccacaggcaatttacccatgtagcaaacctgcatgtatatcctttaatccataataaaagttgaaattaataaaaataaaataaattgtacaaaaaaacccttggacttctaatgccaaagactacatttccaggtatttaaagtaaatagactaaaataattgattagagaattttaggtgagaggaaaacaccctttctctgtggattaataaaaacccaattaatattctttctttttattctcacctctcattcctttatagagaagagcaatggaaagaagaagggagcagggaaacatggtcaaggaaggaaagtgattctcaatcaggagaaaaggtagctctcactggtgaaaatttggtgcagtacaaccaaaatacaaaatccagtttacaaaaaatgaaatatttcagtgacccatatatttatttttctgtgtttttctgcatgggtttgggttttttccctattatttcagaattgggctgtagcctgcaagtaaattaaagaacacttgttttcatttttaattattgatcagctgtctctaaggttcatttactattaatgcagaggtagaattgtgttttttccatactctttagttcttgatgaaccccatatggttctggtgctcacagctcttcaataattcaagattatcatggaaaaataatcaagttttgaaaatctagatcagtggttttcaaagttttttctcctgtcaacaatagaaatattttttttctagttaaattatgatctggactcaaacttttaaactgtgtttaagtggagctgcttggcttttgtataagaaggaaggtttctccatgactcaattaactttccatcctctccggtgaccccagaggtagctctttcaaaggttggggctcctgttgaacagaatttgaagtacactgagatagatgaaaagcagttaggatgtagctcaggctgagttctgagatagagctgatctgggttcaaaccatgaacctcaccatcaactaggcttgttaccaacagcaggtagctgaacttctctaatatcagtttcctcctcagtataagtggggagaaaataatgcccacctcataaaactgttttgaggattgaaataatgcataagaagtatttggcatgtattgttacttgtgtcagttaataatctcttctgagacatattctatagtgatacaatgttggcagtatgatgaagccatagagataatgctactcagagtacagactgctttcttgatgacagacctgaatatttcaaattataatcctaggaggctatagtttatgcttttttccaactctaagatttgtataaagacacatataaagtgtatccattttgaataatacatttaaagggatactttatcccctaagatgctgcactggtgaaaatccctaggataatgtgtaatcttctttgacagtatgtgcacgtaaaatagtttcacaagtgcaagatggcaaatgtaatcttcccatgtgcaaatagactttattccattgagggtagagtctctacagctgagttttttaatgccatggtatcatttatctaattttttttttttttttttttgagaaggagtctcgctctgtcagccaggctggagtgcagtggcgcgatctcagctcactgcaagctccgcctcccaggttcaagccattctcctgcctcagcctcttgagcagctggactacaggcgcctgccaccacgcccggctaattttttgtatttttagtggagacggggtttcaccgtgtcagccaggatggtctcgatcttctgaccttgtgatccacccgcctcagcctcccaaagtgctgggattacaggcgtgagccaccacgcccggcctcatttatctaattcttaataagcaatccattttgctttgtttcttctctccctcgcttccttctcttcttccttgcttctatttggtgccaaacaccgcgttttatttatgatattaaaaagtaaagtgagtgtgatggtggctggtcacccattgttttgaattaataacagaaaaaaagaaatattttagtggcccatatgtttatttttatgtgtttatgtatgtggttttggggttttttagtgccttctatccctagaagtcactttaatctcaagactgtccaaataaacttttcagcaaaagcatcaggtgagaagtctgggagaaaccatcctataaaacaatatgaacagaatggagcagtgaacacaatgctcccattctttctctgtcctccaagccatctttcttcttatagactccctgccatgtgttgcctggctcaggttctacatgttcatcctgccatattggcactggcttctttgaattctgctctagttctgagacggtggcgctttattcactactaactcccaggaccagtgcatgctattcttcaatttattgtgtagattaaaaggtatcttcttaaaaaatgatgcatgctgctgggaaatacagacactttaattttacttagaatcttacttggaatgtgttagtagccagataaacaagcaagactgactcaggaaagaagccagagaaagggtaagtgtgtcaagcaaaagtagacagcagcaccaaattgaaaaaaaaaaaaatgagaggaggagaagaggctaaaggtacatctccttttacttttctttctttctttctttcttttttgtaattttgctttaagctttccattcaaattatcttatgcttcttggactagctattaatattagacttatggttgattagcatttcaaagagatagaggcaatgtatgatgattctgagtcacctactccattgaatgacagcttgactaacccagtgacacatacaggtctcagccacacccctatcctgaacgtgtcttctcagaattctctcccttaatcttgatctttgtgttcttctttgactttccattttatgtctcttttgcctcttgtaatgaattctctgttttcctaatcttcctccttacctctttcaaagtctgtgtatttctttctccctctttgtgagtgagctttctctctctctttttctctaatattttgcatacccttaattcttatctgtacaagccatggattttgaattatatatttgaaatattaactgcagctatttaataaagatttacaactctaggtttctgttaaataacaagtagttgaaagttaaaaatttcacattttacaggagaggttttttgctatgtaagccacttcttctttggactttaggtcagaatatttaagtagaaaaagaactatcagttctaatttaagctgttattttaatgttatagacagtaaatttaaattattcatggcattatggaatattcctgggtttcctgatcctctagttttaggctacagtgtttcatgaactggcttaactacaaaaaccattatctaaaatccataccaaacattaaaagggcagaaaaggggagaaggcatacagacattgaaaaattctgcacaaacttcagcctgtaagtgctttgaactcacacacaacctttaatgttttccttgcattctttgaatgaacctcacttttctgttcagaaccctagcatgtctaggaacttacattgcatgtgcttaatcatggaagtgaccatatgttctttttatttctaactttatttggctctgtctgccctgactttttcctctctggtcataaagtttttatcttaccattcagtttctcccagaaagcctctgaaccagtccaactttgttatttctgtctgctccccgagtccttgatggaagtgtgggtgaggatgggggactgtttaaacttttcccttttaggttaccatcttatctccttgctctcccagtatcaatattctctctgctagagagcagcttctcaacctacttgggtcccttagggatgtctctgcatactaatctttcagtacttatctgcaatccattacttaccctcattaaatacagtttggatcatttcccagagtcaatggcaaaaataaaaaggaatttttagtttaattaaagactggcaccattttttaattaattttttgacaaatagtaattgtgtatatttatggggtataatgtgatgttttgacacatgtttagattgtggaatgatcaaatcagagtgattagcatatccattacctcaaatatttgttatttctctgtggtgagaacacctaaactcctctcttttagctattctgaaatatctgctacattattattaactaaagtcatcttcctgtgcaatggaacaccagaacttattcctcctatctaactataactttgtacttattgaccaacatctcctcttttcctgttcacttcccaactcccagcctctggtaaccaccattctcctctctacttctatgagtttaacttttttagtttccacatataagtgagattatacagtgtttgtctctctgtgtgtggcttatttcacttaacataatgtcctccaggttcatccatgttgttgcaaatgacagaatttcctgtttttgtaaaggctgaaaagtattccattgtgtgtgtatatatatgtatatgtatatacacactttaaaattattcatcagtttatagacaaaagttatttccatatcttggctataatgaatattgctgcaatgaatatgggagtgtagacatctctttggcatactaattttaattcctttgtgtgtacacccagtagtggggattgctggataatagggtaattgtatttttacttttgtgaggaacttccatgctagtttccaaagtggctgtactaatttacagtagcatcaataatataaagtcttccccttttttccacatccttaacaacatttgttatctttcatcttgatagtagccaccgtaacagggtgaagtgatatgtcattgtggttttaatttgcattttactaatgactagagatgttaagcactgtgggcatttgtatgtcttcttttgagaaatgtttattcaaattccttgcccatttttaaagttatttttttccttgttattgagtagtttgagttccctgcatattttggatattagccccttatccagcatatgatttgcaaatattttctcctaatctgtgggttgtctctttactccctgaattgttttctttgctgtgcagagttttttggtttgatgcaatcccatttgtctatttttgcttttattgcctgtgcttttggggtcatatccaagaaatttctgcccagaccaatatgggtactctcccctaagtactttttagtagttttacagtttccagtcttatgtttaagtccttaatccattgtgagtttattcttgtattaggggtgagataagagtccattttggttcttctgtatgtggacttctgttttctcaacagcatttattgaagtgactgtctttttctcattgtgtgtccctagtgcccttgtcagaaatcaattgactattgatgtgtgggtttatttctgtgctctctgtcctataccattagttgaggtgtctgtttttacgccaatatcatgctgctttgctgttttgattactgtggctttgtatattattttgaaatcctgtagcatgacgactccaggtttgtcctttttggtcaacattgctttggctatttggagtcttttatgattccgtacaaattttataattgttttttctgggccaagtgtggtgtcttatgcctgtaatcccaacactttggggggccaacacaggcagatcatgaagtcaggagtttgagaccagcctgaccaacatggtgaaaccccgtctctactaaaaatacaaaaagttcgccgggtatggtggcgtgacctgtagtcccaactacttgggaggctgaggcaggagaatcacttgaacctgggaggtggaggttgcagtgagccaagatcacaccactgcactgggtgacagagtgagactctgcctcaaaaaaaaaaaaaaaaaagaaataattgttttttctatttctgtaaagaatgacattgggattttgataaggattgcattgaaactgtaggtcactttgggtaatatggaccttttaaaaatattaattcttccagtctataaacatgggatatcttttcatttgtcatcaatgttttatagttttcagtgtagagatctttcactttattggttaaatgtagtcctaaatattttgattttttgatgctattataaataggattgttttcttatttctttttcagacactttgctgttagtgtgtagacataccactgatttttgtaagttgatttatgtatcctgtaactttactgaatttgtttttcagttctagtagttttttttggtggagtcattacgattttctttatataaggtcatgttgtcagcaaatgaagatgattttacttcatcatttcctattttgatgccttttatttctttctcttatctaattgttctggctagtacttcgagtgctatgttgaaaagaagtgatgagagtgggcatccttgtctttttcctgatcttaaaggaaaagtcttcagctttttaccattaaatatgatgttaggtgtgaatattggcatcattttcaacaataaaaatgtttttaaaattttatgttgtggcaaaaattggctatgcaagatatttttatcattttataaaagattatggatcaaaaaatattaatgaaaataaaacaaaatatattaaagcttcctctattatctttattcaacttaggtttaaattgtatgataaattagaaatggaagatattaagaaaataaaaggctttatagaacttttgtagaaatttgaaagatttgcataatttgtatagagtaaaattggggacagttttccatgaggtcataagtacaggataggagggcattaaggtggtggaataaaattggtacatactggtatgggacataattacagcaaaatgtgtgcagggggtaggattcatttattcagtcagttggacagtcaattatatattttacaaattgtctagttagtgttattttgtgccagtcattatactaggttttgggatttcagtggtaaataaaaacagacaacatgaagtataactgtataagcattcattgagtaataacacaataatttaatgattatgtatgtgtttggcaggaagacaaccgaagccatagaaccacatagcagggggtcttgttatgcagagtgtagaatcagagatttccatgatgaaatgatattgaattaaatattaaagtgggagtgaagagaacatcctttctgttttattttgagattggcaaccctcggcattcttaaagttcaaggggaaggattcagtacctagggaatagtagaacatatggaggaaaaaaagatatctgcaagatatctgagatggtagaaataggaaatgaagttgtaggattttgtggtggggaagcgggtcacagtttagtgctttccttaagacaggaaaagatacttgtgattgttttgtaaataggctcttgaacagggaggaaactggtgaagctattgctttaagaatggtggcaatagattgttgagcgattggaatagcttaagagtgaaagaccaggtcaagtggaagatagctgcatctaagcagtcattgagtaataaggtcatgaatcgagatagcttaatgtccacgtgaaaattatcttctatgttttctgttttcgtgacatgttttcactcctattttttttaaaacaaaatgcagttgtgtgtatctcagaagtcctattcagtaaaaattttccctatactctcaggaagagttttattgcaactcccccagaatcccacagaatttgatttctacctcttagtgcacactctatgaaacaatgaattgtttatgttcttgttacctgaataaaactgataatttctcatgggcttggagagttgttatttattttttatagcatacacaaggcagaatttggaaaatattggacacacaatagataacaattagatattgttattgattgactgagtgcctagatgaagagaatcaacatttgcattttttatattttccacaggtagcctgtcttgttgcttttcttcttagtgtatctttaagtaaaagacttcataatttggaaaatgccaatacctttattgttgaaatcaattgcatgcctaaagcagacagattaactgcttttcaagacatagagaattcatggtaactggtttatctaacagtattattattcagtttcagaataatacataccaaaatatgttgtgttttcccattcttagtggctgttctaacaggttcaccaacaacgttgtttacttctctctttctctctcttactttctctcatgtctctatatatctataatctttctatctatccactgatctataatcccatgtatatacatatatgtaccctgaagcgagataaacatggatttaaatcgtgttgccttaatttaactatgactcagaaatgtcatacagtcactgagcctcagtttctgcatctgaaaatggtaaataatttctcttatcttgcagactttaagacaggattagaaataacatcttgtgaagtatttaataattggtagacaattcacagtggctattattttggtgtatactttatggtactcattgttatgtagttgtatataggcataaatggttaatgctattcataactgacaatgtattctgatcctttttggtggacaactgagagaaaagtctgtggtttcagattctgcccctttaggaatggataattgagaggaaggagccgggattcttcattcctctccctccattagcatccaaactggaaccttcatgatggaggataggatggattctcctgttagagaagatagttgcaccatctgaacactggttactcaggattctatgtttatcttttaactttttcaatgaggacgactattgtattggcagaaagagtgctttttgatatggtttatgtatatgcccaactcctaatgcacaaacctgttagtagagcacattcaggatactcaagccctgactactgttgaataaagaaacaataaccctattttatttagaggaaccacctcaaagtctcttgcagtaatgctcaattctcttcccttcctaactcaccaggaagaagggggctggaggcacaaatacatgtttcttcccactcccaaagagaaaggctgtgcagtgggagtaggctagatgttacaattctttgctccattaggggattaaaatgacaggtgacacttctcttttataagctaggcacctaggaaaaaaaggttgcttgttttgggtttgctttataataagaagaatatgctgaagcacagggtgctagaaaataaaagatgggtaagaggtttgatgaaagactgggaataaaagtagttgcatttctagaacagcatgaaaatgtaatcctacaatgtttgagattgccatggatgaagttttaaagaagtgactttgctcaggaaattaagtttttgatcaaggagagtaaaggttaagaaagtatttgcaatttggtatcaggtttagagaagacttcaagtgttatagtatagaggccatttggaaagtcaacccttagcctaaagtatggagaaaggggagggagaggagggcttttaaaaggaagtaggaaagacaaaatcgtatcttgctcatttgataattttgcctaaaatctgatgggactgatcttagcttagtggccccatctttttaaaaacgtttcagcccatcttttctggaattggtaagattggaagtggatagcagctgggcgtgtcttcaaatgatttgttgttgaacagaataattccttttctagaactaacccatactaaggtgttgtatagaggtggagtagggtggtgatagctagttatttattgggcaaacatgctaagcaaagtagcttagaaagtataatggcacaaagataaactgttggcttacttcctgcttagtgaaatattgtttattaagactcaattcatagttggcttctattgattttttaccatccagtactcaaagatgtgcaaaaatgttccagcatttgctcaataatcaaatgatcactttctttgtattgacaatctctcttgatgttagtttgttccacatgtcatccaaggctgacaatcgttatagtagcctcaagtttttcgtcattacaacttcttgacctctctccttctttctctttctccaacttaagacccaggtatatagaaccatttgcaacttctacaacatactgtcattgcttatactttacccagtggttggaacattctaacttacttcttcacttgcctcactctactgaattctcaagacggggctcaatgtcctataggaagcatggccagttgcaggatgaagtcaaagatagctgtctctgctacgtgctccagttagatttctgtgctttgtaacagcattaatcacaacatatagcatgtcattttcctgctcctctctttctgggtcatgaataacttgaggaggaagaatctattttacttttgctttgaaatacacacacacacacacacacacacacacatacacacacacacacacacagaatacctaatgtatgattcaacataatgtctggcttagtaggtcatcagtaggttcaaagaataaatgaatatatgaattgcaagtgctttgcataatggatatgtaataagtaactgttaaataaatgttttcaaaggagttactcttcttgaagaaagcaaacttcttgattctatttttattacaaaagtttaaagatatatttaatgagacattttcaaaggaaatgccataaatggaggtcattaatcattcactaattccttttcaaccaacttcaggtgattgtttcccccaaatcaaataaatgttaaaattatttgtatagctgttaaagtgattgatataacttacatttaaatggaagaaaagtgttttgatagtaacattttcagccccaagatagcatgttttcctcatgtgttttccaaagaaaggaagctagattactatgacttaatttataatatatttcaacattgatggatgaaaaaataatgaagtgtttatttacctgaagaaagtaaattcaaggtccaatatatcttaatatactgatttattgcttatgtaatgtataatattaattatgtacaactgcattatacaacatacataatggcagtaattatgttcgtgtgtctgaaatacatttttgaatgaggtatttatttattgaattcaaagggcagaacaataagttaaaagaaagtataaggcatggccagagctcggtccagtttccagcatacaacaagctctccataaagcataatttctcttttaaggatattgtccttaaggcagtgtgctgtggtagtgttgagtcaagcagtctggacttaataagacgtttccctggcattcaaaagtttttgatctgttaaaggtagaaaaatttttattaaaaagactattttgtattagccaaaaggggatataatcgttgttaatgtaaaaatagatatgatgtattacttaaaaatttttgactctctaatatctttcaaatttccaacaccaacagtaatataagtccagtaagccatgaatcaaattggaactgtacttcagcaatggtgtagttctttgcagtgcagtctattatgttaagtagtttcttaccgtatgaaattcatgtgttcttttcataaacctaggattataaaaagtctaatgtgatgtgtgagtttaaggctatgaatccagctttagggaggtctcattaaggaaaaaggggacagatggatccatgtgcctactgtgtgttatagtgcctactgagtgcttttggaataaaaagatgagtaagtttgagccttttaacaatagctacttcccttagaaggaggaaaggaaattacagaatacctctttgaatttttgaccagttataaattttttttaaaagtgaaataaagaagttaactaattggatttgcttcactatttcagtcaatctgtgttgaatctttgagcaaaactggttgagcagcttacatgacagctctccaagtaaatggaaaatttcccaagctcatgctggttaggaaacagaagtcctcttttaaagcagtgcagaactcagcagtttgggtttcattgaactggcttagtggtttcaacttatataacttccatatggaaagttaaggggaacatagaaaccaaaccctcttattgtaccacctgagagcagctgctctttcgggggtttctggtacattgcctaggaccctggagatcttttatttttcctaaaaatctggaattctgtccaaagaccaacgaaaccatgaaagtcaaacttatgcaaactaatttctaatggcagtgagaggaggaaatccagtttaatctcctttttaaagtgcacaaacacttggaactgtttgacctaacagtcagcaaagggtccagagagaaccaacacaaaacaggcaacaggattgtgttctctagtaaatcatggatggtgaaaaaattttgtttttcttttgaaatagtctagaggcaaatgagaatattaggctgaacactgtaaattacagacaactaggaaccatgattggtaaggactaaagatgcaattttgaaactaaaacaaacaaaaaatttatgtctcacttggttatgggaggacattgagaatcaatgaaggtctgtcaagtattatactaaatgtattatactaaatgtattatatgtgctttgtcatctaattttttatcacttctgtgggtaggaattatttcaacctaatttttgcttctgaagaaactgacagagagacggaatgtgtttctaaaggactgaaaaggggtgaatttaggatcgaatcctaggtgtgtttctacctgttttaaacatactgctttctattttgaggtgtttataatatttcttttaggtatatgaatttacaaatgccaagagtgggttgaaccattcttaaaatattgatagtttcataaaaaatattgtaaaaatctttacatgcctaaaattgattacttctctgagaaagtttctacatgattgaatttgtgtggccgaatgaaaagacatatgttttagaagagaaaagtaatgaatgattgatgattgtgcagtgtttctatccagtgatttagaactcagcttgtttgaattgctttagcagagggatcacaagcgatatatattttttaagtaaatgtttaaaacattggctatatctttaattagagaaaaatttctggactcacgacgagcacagaaatttgagaaaattagtgtaattaaaactcagatgtccagcaagtttgtattatatttcttttgtgcttcataagatgtgaataatattttccaaataattaagactgaatgttaactctgtgagaaaaagaatttatttttagaaatttgaataagaatctccctttaaaatccacatttccatgccatatgtgatcattttatgagtaaaattttacctttcctagaatccaagatcattattataaacatcagctactgagttactctgttaactgccattgatacaatttttacaaaatataaacttgagtaacaactggtcctagatttaacaaacagaaacaaaaattacccatttattgtaataatgacatatttttaaatcttctataactggaataaaataaccagccactatatgtatctgatcctctgcattctcattccaactgcatgatgaaggtcaaactcctgctcaatgcatgatctttgtcacgaggtggagcttaccaggacttatgactgtttacaaactgacctttttctcctttgacccctatctttttcttagtatatgtgctgctgaagtaagcattctcctttgactctttcccttcattttattattatttttttcaatttttcttttcaattttttgtgggtactcccttcattttagaatctcaaagtagcacttagtcaccaaatgtctgtttcttctgttttgaagtctaatctaactcctctggctcccctgagctaatgctgattcccaaagagaaggcacccttaactcaaagttagaaatataatcaaagtccctaagtttcctcaaatatctctttctagcatgtctttctgaactgagtcttatcagaaatttctcctgcaaaaatactttcctggcttgtacttcctaattttattcaagaatgtagcaggaaattcatgaagcattgatgaagtgtctattatatggaagatactcaggttcttcaccacaaagatggctaagacgcatgctcatcccccaagatgcccatgttaaagtggggggcagggacataaagatgtaatatatatatagatgattgtgaaatgatatagacgagattcaatcaaagaaaagatgttcttgaaaagcaaatctcccaccatgattaagagtctgactaagaatatgggaatgaacgtgataggcagtgggctgagagatgtgcaaataaatgctgtgttctaggaaccatgtatagttaaataaggctgagcatagacatgagagagatggggagtggaaggagggcaggctgtaagggtgagaaccataccacaaatgagaccatgctagggaatcagacttgattttacacatgatgggctgcttttggagtgtgtttattttagatgaattattctgtagcaacagtgcagaagagatatttgaaaggggcaacagtggaggcaggaaaaccagttaggaagtgattgttgtcatctgagctggataggatgaagctttagattgggtccatagcgatagagatggaggagagaaaatttagagaaatatttattaaatgtacgtgatatggagagttctaaatgtttaccttgagcagcaggaacagatgcagattttgtggggcctgaaaataaagtaaaattattaattcaaaagcaggtatgaaagtaaatatttatttaaaatgagagaataaatcacaaggttacacactttaataaaatgacaagccacaaacctcacaaaattgagaaaaagaaatgtattttatataagcacaaactcagtatttcttcagttcaactttcctttagccatattccaaaactatctgtactcattctaatatctcccaacgtgaagaaatatgatagagatgaaatcagaattcaaagagaatcaggagtgagcaagatacatcccagaacctttgttcctggtggtaaattaagcaatcatgtctggcgaaagtcagcacttgttatttcttatctgcgtaaaatattttccattttaaaccaagaagactctgaattatcgggaattacatgtttttggccataagagtggaataatgactgtaatcattaacagtaaggagtgagggaggctactcaatgaggaaagaaatgtgtaacattgcttcacttaggaatattatccccctctgctattcactcttttagtgccttcctgaatagaatatcctccaatattcagatacaatgggctctagcatactctttaagaaccaaaatcttgaaatctataatgaatcaatgcagataaacttttctgaactttaattagatttttatctatttgatgtctatgcacagaaacaagatagcaaaactaagaataaataggattttataaattgttttatttaaagaatagcaaatattaactttagagtattaattcctgtgatttccttgatattttttaagacaatcagtgattcctatgagaaatgtggcaagactggtgaaacatgccatcttttaagctttctgttcttcctttgagagacagcccagcatagggattaatgcaggaaccatggagtttgactgatttagttggactccaggctgcttactggttatattctacttaacctttatttgcctcagtttcttcatctgttaaatagggataaaatgacacctaccttactgggttattgagtggattataggtgttaatatatgaaaatatcttagaagcaatgcctggcttctaaggtggctgttattgttgttatccaaagagaaggaaacataattttccttagactagcctagaagtccctgtacaactgagtcagtcagatctccagactttattcctagctactataccaggtatgctgagctccagcccagtgttgctcagtgtgttccatatggatgttctgagataatttgttatgcccagtaagtgtagagctgaattaaatattttagaggtggcagaaagttccatatagtttttcatgctttagactcataactccaaggctatatggatggtctctgaagatgatggggcaatatcctttctatctgttaccgtgagctttcactgaacatgaccataattgactgtgctaagactttggcctttcctacttttgtggtataagttcagaccctttgaagaagcagttcataaatgcaattaaataaatttcaccccaacattagctgtcctgtcctgacaagggaagtgttgcttgtttacttagcacttgtgtcttgttaatactggtgatggccatctgtgggtatgaagagctaatggctgttaagtgacagacgaatcatttccacagagcatgcatacacgttctttctttggatggcgtctacagtttgtccttggcagaccattgctattttcagacttgcttccagtatcctcttgtatgtgttgcctcacagtaacttgtcacttcacttaagcagaaagctcacggttctctcattgctgtacctcctgtactagcctctgaatgcaatgtttgggtgactgccattatcacttcctttggcttttgatcactaaacttccattatccaggcatcacttgtatttatgagtaaacttttccttttgcaccacccccatactccaagtcttatagatgagccatttcctgacagctaaggagcaatcaactccactgtcctcctacataataatgaataatcttttcttgcagtcaataaaacaggctcccacgatcatatccttttatgacttggggatgctggtgaaaaatcttgaccagatattatttgatttgggagaatagagcaatgtaaatatggcattcaatatgctttaaaataattatctggaaggtgtaactttcatgctaaacatgatttacactacaaagaaagtagtctaggagaaataaaccacggaacttgtgggcattttgtaattgtctaatctagctcctttattttatagttgtggatgctggggccaagtagagttgactttctcaagggcacatagtcaaggagcagtggagatgctggaatagagtcttctgattcacagcctattactcttcattctcggatgttttataactgataatatctttgaaaatatctaaatatttttgtttgggaggctacttgagatcacttccttttcactgataggtcagaggacacacaagaagtccactcttaacatatcagtaagtgagtgatggatgaagtgaagaggtaagtgtagacacctccatttttaagttacattgttggggagatgggaagaaatgcttaatgaattagctctccgtctttagtcaatctatctactatgatttatccagtaatgcattggcccccggaacttggtgcttttacatctagcacatctccatatcttatatttgagtaaacttttaaatatttattaattgttattctgagagtggaaatatcgtaagtgtagaataaggagattaggctctactctaaattctattgtgaacctgaatcctaatcatgacaaagtcactactctttgcctcagtttcttcacatgtaaaattgaggtgctgctttaaatagcatcatctaaaattcatttcagatattgtgaatggaaaagctacaatctctgaatgttacaactgtcaggtcagttaccctcatggatttcatacatttcccatgcctggttgttggcagagggaaaagagtgggagtgtggtgtctgtgttagtattgccagctgatgggctttaaaacaggagtagtatggtttgagtaacaaaaataccttcttaggatgcctcaccaaataatagagggtgctgaagagagtatctaagtaagagacctggctatttctggaggtttttcaactagacctacgtttaatatttaaaaacatgaaaactcatgtaattaacatgtaacttatttgtattaaaattagtatgctgacatgatattttctaaaactgggccacatatgcatggatttcctaaataatccttcaagagaatagagcaggaaatgaagtgatatgcccatttgcagtgtggtatggggcttcctgaatgtataaatgtggaaggcagcaaggtggggttggataccagtaatgccaagaacttaatttcagcatttcaaccaccgtgtacatcctcaaaatgcctttcactttaattttgtataaatacgaattggatcccgggttaccttttgctttagagatgaaaaaaatgtatttacgtttcccacacaactgctaggaattaaagtagtgtgaaaactccacacaaataaataatacatttaaaactatttttagaagaataattcaaaaagacagtagttttgggacataggcaacaaaaagtcccttttacctaggtttctttgattcagagattcagcatacggatttatggagacagattatatcctcaacaaattaaagaatacaggatatacactgttgtctaatataatatgaggaaactttaaaatttatttccatgaattctatgttcaattggaaatatatgttcaattgagtatcagtagaaaaatctattgtttttactaatgactcagctgcttaaatgatctattgtatcggtggccagtggcaggaaggaggctctgtgcagtattgttgtaaccatgacattagtgacatcatttagcagaaatagaatttgggacatttggaaaacaaagcagtggcctcttggctcaactttgtgagaacctaataaattctaagaaagtataatggacagtgttgatttctccatatatatttagtgattttacatgtatgcacacacacacacctacatacataaagtatttcatttaaatttacctactaatgtatgatattcgcaatgccgtatagactttgggaagaatgttaatcttgtattgcaaagccatgctctactttaaaagcaatgcctccagatgtacagcatacttaacagggccaagaaaacatgtaacgttgattctgttctgagatacacctttgttaaaaagaatcccttcagtttttcctgtctgactaaaaatgatgaaaggcagggtatcctgaatggctgtgttagaacatcgaggtattggagatccgtgaaggagcatcatcgttactatagaaacaaatgctgcccctgtcatggacatccaaaggacagactgaaaaatgaggaagggaaaagcaatgggaggaagaggtgccatgaaatgagaataaagaaactacacaggaaggactgaattaagaaaagaacagcctgaggcagagtgaggaatctagacacagaaaattcccaatggaaatgtaaaaaactggatcaccacttgtgtgggtacaaagaaatgatgacttttctgtttttaaaagttaaattttcttctaaagtataagtatgtttttgcctttggaacaactttttgtatcctgaagtctctcttatggcacatgtatacatatgtaacaaacctgcacgttgtgcacatgtaccctaaaacttaaagtataataataataaaattaaaaaaaattaaatttgaaagaaaacaaaataagtgaaagtattgaagattgtgatagaaaatgtgtttgaataatgagtattagaatctgtgacaagtcactcgacctcaccttaaaatagggaaactaatagcaacctcatgattattgggtcagtataggagagaaccaaattcaaaccctgctccatggagtgaacatttctattttgggggaaagattagggaacggaatctgggaatataaattattcattttagtatttcagaatgaagagaaaagagaagatttcttttcctttattcctctcgctgaaaaagaataatttgttcatgtttgaagactgtgaacagaggtagaaaacatttattatatatatgtaaatatataattagatgacagtttacaaagtgaatgaatagatgctattaaaatgctacttttgaccttcaaaaacatctcaaatagggttgatattatttggttatttgctgatttggataaattgccaagcagaattttatatcaagaatagaagatataacgtttttctataacatttgatatgttttctggaaatgtttacttatagattattatcactcatgtattgtggtagacaaggtgatgtagcatccagatacctcttaaaagaaacacttcccagctcctgcctttttatccaaagtcatactattcactccttagggcagcctactttcatagctgatgaaggttggggtataaaggtatggccatcttctgaggttctgttgggtttaccaaggtggtggggcctgcattgaagctcagcttttcttctgccagtcctgcttcttcctcatccctttcatgttgttgagtccaacaagacagttcttaataaacatcctgcatgctaaacttcaattcacagtctgatttctagagaatacaactggcatcatatactttactattacaagtaaaatatcatatggataaatattttctatttgaaatgtccgtaaagttttacttttaaaatcagttttcacatgtatgcatagcttcagattacctgtactatcctttaaaaattcacaaagaaagctaaaaatgcttgcaaaaattgttagctcatgttttatatgcagaatcttagtgactaaggaattttaagaaaatatttataatgatagggtttcaggagaccctagagatcgcatcaaacccacttgtacagataacaaagctggagcctagagggctaagaggactctttcaaggccatgccagggcttagaacacaagaagtcctactactgctttagctttctgtgttcagggaccgagtttttttttttttttgcctttcttctctcttttctttcctcttctgtttctttaacctaatttgcttcctcatgttcgtaagccacagctgtttcccagaactgtgaaatcctttccgagaaatgattaggagtgtgatgtgtgtagggtggtatagagagagcacctataactcctgtaattctgtcaacttgtaactgtgcttaaaatttatcaaattagagggtgttttctgagcctcatgacactagcggttttcccagatgaagtgaatgttacccaggtttcctctgagaatccagaaggcaggctgatgggcagcttcttcattttacattcgagactacacatttgtaccttcctcccatgagcacaaaaaaagtattcaatatttcttaggcattagatgtaataaagtgtcattaggagttttatagtgtagaaaaatgtattatttccgagcccattttagtctttctatgtgggagacagtgtatttactgctaaacatgttctacagtatatggcctgaatatattctgcagttatctcatatctaagcaggtatttaagtagttgagatccatttatctttcctgaaatgccttaataatattttataactcattagcgtgtacaaaatacttttacgtatgtgtattaaatgtttgttgaataaattatacatgttcttatattcagacattagaaaagaaagttatgtaataatctcacttaatttaagcctcaatctatgaagtaaatattatcttctccattttccaataagaaatctaagaatctgcaagtttaagttctgataaccactggcttacattttctgtttatcatgtcccagacatgttctaggagctttatgtgtattaactatttctttgaacaacccagctgaagttggtaccattattatcaatggcattttacagttgagtacaatgaaacacagagagatagagtaacctggccaaggtcacacagtgggtgaatgttaggaatgggggctgggcgcagtggcttactcctgtaatcccagcactttgggaggctgaggcgggcaggatcacctgaggttaggagtttgagatcagcctgaccaacatggtgaaaccccatctccactaaaatacaaaaaattggccgggggtggtggcgggtgcctgtaatcccagctacttgggaggctgaggcaggagaattgcttgaacccaggaggcagaagtaacagtgagctgagatcgtgccactgcactccagcctgggtgacaagaaagaaactccatctcaattaaaaataataataataataaaaggaatgggatgcagcctaagtaggatgaccaactatcctggtttgctcaagactgaggagtttcccaggacacaggattttcagtgctcacaccataacagtctcaggtaagtggaacagttggttggcctaaatccaggttgtgtgctcaaggacctacacttttaagcacctagctcttctgtttctcatgcagaaggcggtggatccagggtttgaaccctcattgagtgactctgaagcttgtgcttttatatttccatcatgttgccgtgatttgtattttaatacaaatatatcacaaaaagtgatcatagattactaacgtgtaatatgtttggataggtaatcatataccaaagccttatacatttagttagacaggaacatgcattcggatatttgtcatgattcttttgtaaacagctttattggggggataattgatagcaaaaaagcacatattttaggtatacaatttggacatatccatacacccatgtaacagtcactataaccaagttaaaaaacatatttatcagctccaaaagttttctcatgcccccaccttttagtaagttctagatatctgttcaacatagtgcctatatcttgtgctctttaaaagttgttaggagagtagatctcatgctttcattcctaattggcttcgtctcatttgacaattggctgtttaatttttcttacacttcagtttctcccaaaagcctattccctattttccataagttactacagacttgtagtacagattgatattttattcttccctttcccatagttcactcctgaatgatatctttctcatgtgtaccctacttcaacttcactttccctgatgggtctgaaatatatgatgtatacattcagtatccacagatacctgccagtttcctcttctgtcatggttcctccttatctataggcccttccttctcaaagtgttattgtttccctaatcccaactcctcacatctcttcagtttcatgacatcttcctataatattgtgccgataaaactgccttcagattggagagaagggagaaatcagtgtaaactagtgttgtcatggacacctttatagaggtgatattagtcaaactgcgttttaaagagtgcaaatgcgatttagatgagcatcagtaatatcaaagtcttgattttactgatttagatttgaaggaagattacatctaggaactaaggaatattaaattagtctttcttttttatttcatgaacttaatcatgagtgaactactagctgacttatgcaatttctagactctgtctttgaaggcagtgttcttaaattgtggaggcacatggtgcttaattgtattggaggttggctttgcattgtaaagagcatgtttgcgtaacgcttatcaggtgagttacttttgactggcatttatttaacttccttgagcctcgattatcttttggctagccaaacttaccatgtagagttgttgtaagaataaaaatagataaaggattaataaaatagctagtttagtgcctggcacatagtagctattattagtcttacctaaaaagttgttattctgttcatggatgaaagcaattgattttctacttctttcaatactctgatgagataacaagtacatgagaatggatgactgtggttagtattgtaggtcaggaataagaaattatttttaaactcatcccactctttccttctatagcaactccttctttgtctggattgagatttaagtagatgcttttctccagtgcttcagtactgaatgtttaagaatgccaggtattttaatttaaaagcatactttttcatcaaaaatgatgcattaaaaatattaatgttaacagtagataacattttgagatataaatatagcacactctgaaaaaatttttcatttaagcatgttgatatgttagatgttagattgaggtagacagagggtttgtgattacttgttttgtctacaaaaaggtagctatcagaaatgttcaatattgttcacattcatatttcaacagaactaccacttttggtaaataccaatatgtgtaatattttctggctacacttccctagaacaaaatttatatttttcccataattgatttaacttcattatttgaatatatcttatagtcaggtatgtaggtgatgcttactttatttatgctactaactttttttaaatttacttattgaacagtgcttttcaggctaatggggcctctggaggcaataagaaatagctgggaaaaatagatgaaatgtttcattttaatttcaattgttatttgcatgcaatttattttctttcagaccttttctctattacagaagttatgggggttggagggagagaaaggcaacgagagagagatgtgtgtaaaattgcctttcctggctgtggtcagaagggcatatgactgtggaagaatggtcagagacatgcaatgctaattgctttgaaggtggaggaaggtggccaggagccaaagaatgaaggcagcatctagacatggagaaagcaaggaaattttatatctatctatctatctatcatctatctatctatctatctatctatctatctatctatctatctatcatctatctatctatctatctatctatatccttacttgggaagaaactttgtggatgtgattaaagatatggagcttgagatgggttatatgattgtgatcagtctaatcacatgaatctttaaaagtggaagaccttttatgcctttcctggctgtggttaaagagaggtgactacagaagaatcatcagagagatacaatattgatggctttgatgatggaggaatgtgatcatgagtcaagaaatgcaggtcatgtttggaagctggaaaaggtaaggaagtagattctcccttagggtctccagaaaggaacatatccctgctgataccttgacttttacccagtgaaacctgtgtcatatttctgacctccataaatgtaagagaatacatttgtgttgtttaagtcactaactttgcagtaatttatgacagcagcaataaaaactaatacatgtgtacatttcagattgtattgaaggaaataaatatattttcgttgttttgaatgtatgtatattcatctctagcataatctgtagtaatataagcttaaattatcatcccctacccaagacaaatttatttataggagtccccagtttggtgcaccatgaacttgcatagagggaactctttccttatttcaaaggatatttactgagcacttagtatacaccaagtgctaagtgctggatatactgtaaataataatagacatgtttcccactcttactacattattgcaacattagtcattactagttctgccattttttctcatttttagattgtgctaaaaaggaggaaatactaaaagagtattgtactaaaagagtccttggataagggcctctttctttcttggtttgcagttagcactgttccaacagtatgaagacataaacaatttttaaagaatggaagcctttttgaggctaatacatattatattcgttcattttcatgctgctgataaagacatacatgagactgggcaattacaaaagaaagaggtttattggacttacagttccacatggctgggaggcttcacaatcactgggggaaggtgaaaggcaaggaggagcaagtcacgtcttacatggatggcagcaggcaaagagagaccttgtgcagggaaactcccatttttaaaaccatcagatcttgtgaaacttattaactgtcaccagaacagcaagggagagacctgctcccatgattcagttatttcccaccgggtccctcctacaacatgtgggaattatgggagctataagatgaaatttgggtggggacacaaaaccaaaccatatcattctgcccctggcccttcccaaatctcatgtcttcacatttcaaaatcaatcatcccttcccaacggtcccccaaagtcaacccatttcagcattaactcagaagtccacagttcacaaagtctcatctgagacaaggcaagttcctttcgcctataagcctgtaaaatcaaaagcaagctagttacttcctagatacaatgggggtacagctattgggaaaatacacccattcataatgggagaaattggccaaaacagaggggctacaggccccatgtaagtctgaaatccagcaggggagtcaaatcttaaagctcccaaatgatctcctttgacttcatgtctcacatccaggtcatgctgatggaagaggtgggttcccatggtattgggcagctccactcctctggctttgcagagcacagccttcctcccagctgctttcatgggttagcattgagtgtctgtggcttttccaggtgcatggtgcaagctgtcagtggttctaccactctgttgtctagaggacggtgtccctcttctcacagctccaataggcagtgccccagtagggactctgtgtgggggctctgactacacatttcccttctacactggcctagcagaggttctccatgagggccctgctcctgcagcaaacttttgcctgggcatgcaggcatttccatacatcctctgaagtctaagcagaggttcccaaacctcagttattgatgtctgtgcacctgcagacccaacaccatgtggaagctaccaaggcttaggacttgcaccctctgaagccatggcctgagctgtaccttggccccttttagtcatggctggagaggctgggatgcgggaaccaagcctaggctgcacacagcacagggggcctgggcccgggccatgaaaccattttttccccctagacctccagtaaaggaaggggaggggctgccatgaagatctttgaaatgccctggagccatttcttccattgtcttggggattaacatttgactcctcattatttacacaaatttttgtagctggcttgaatttctcctcagaatatgggattttcttttctatcacattgtcaagctgcaaattttttgaactcttatgctctgcatcctttataaaactgaatgcctttaatggcacacaagtcacctcttgaatgtttcgctgcttagaaattttttccaccatataccctcaatcatccctctcaaatgcaaagatccacaaatctctagggcagaggcaaaatgccaccagtctctttgctaaaacataacaagcatcacctttgctccagttcccaacaggttcctcatttccatctgagaccacctcagcctggaccttactgttcatatcactttcctcaaagccattcaacaagtctctaggaagttccaagccttcccacattttcttgtcttcttctgagcccaccaaactgttccaacctctgcctgttacccagttccaaagtcgcttccacattttcaggtatcttttcagcagccccccactctactggcaccaatttgctgtattagtctgctttcatgctgctgataaagacatactggagactggtcaatttacaaaaggaagaagtttattggacttacagttccacatggctggggaggcctcacaatcatggaggtaggtgaaaggcacattaagtcacatctcacatgaatggcagttggcagagagcttgtgcagggaaactctcattttgaaaaccatcagatcttgtgagacgtattcactatcatgagaataacgcagaaaagacctgcccccatgattcaataacctcccactgtgtccctcccctaacatgtgggaattatggaggccacatgctgaaatttgggtgaggacacagagcaaaatcatatcacatatatattcaggtatcttaatattttctcatataacatgggatcaaaagagagcttattttctttggctatatcacattgtttttaagatacctcttacaatggaacccctgagaatttaaaacaatttctggccaaaatggcagtaaccaaggaaaaagctcagttagaattccaagtccatacacatttggaatccaaccctgacttcaaaaacagtttttaagtaagtcattctgtgaaaattaaattataaatgacccatatgtaaagattaattctttaactactatagcatagcatgccccctgaatgttaacagctcttatttgtttcagaagggacttcaggcaacaatttatatcttgtggttttcaatctggcttcatttgtcaccgagttgtgaagcttcaggattaaattttgtagggctagtgaacacagactccttatcaaatgttcttgactattactaactctttcggtattgtgcaaaaagtagaaagaaaaatacataggaccaaaatatcaaggagtttttacttgctgtaaaattcttcccatatttaaaatacatagtacaatacttgttgtttccttaaaggaacattcagaaaaatgtagcactctttatgtgctttccaatgtggtagtcattagccagacatgtgaatattgaatgcttagattatggttgtccaaactgtttacacgtgtaaaatacacactggattttgaagatttagtataagatgaaaacatttaaaatatatcataacacactttgtattgattacatgctgaaattgtaaaattttgatatatttggctaagtaagatatattgttgaagttagtattgcccatttctttttacttgttttaaaacatagctactaaaaaatttataattctaagtgtgctttgcttctgtgactcacatatttcagttggacagtgctgttttaggtgttaagttagttattccaattgtaggaaaatacagggaaccatgtttggattcttaaatatgaagtgtgaggtcagtgtctcctgccttgtgaagccactcctgcttggtccttctcttcttcctgagtctggtgtttcagtgggggtatctttcttgtaaagagagtgaaaaataggtgtaatacatataagaaaatgattagaatgtcactgaatgtcataaaaagaagtgaataaaattgagaaagaagagtgggcagcatatttattctgtcagctataactatgttctttgtcctttttcagggaatctctagaacacgttctttgaaaatgagaaagatagcctgtttattcaccagataaagattacatgtggtctttagcaagaaacatgaactcaggaggatgacagattttaaccttaatttgaatggaagggaagcattgtataagaaggattaaataatgtgacttcacactgtcttcatactagataataactgaaaactgattggcaatataacatttattattttccctgtaataccgttattagaacacaggaaagtggttatccaaatgcccatgctttctaaagaagaaaccaaaggtctgatgtctggatatgagttcagactatctttccactaagagtaaagacttctcggtttcatgaaggacaggctggtgaaaggcaaaaagacaacctataaaatggatacagagagagaagatcgaatcataaagtctctaagcctttgtccaattatgagatatttttcttttgtttcaagactttactgaagttctgtgagctacactcattgtgtaaaattgataaaggttaatattaccatctaatctgttgaatattattttatttaaactgatataccaaaggaaatcatgagctttgtgttagcaaaagggagagattttcagtattctcttactgcttacaaataactgttttatcacacaccaggcctgtcagtgggtggagagcaaggggagggagagcattaggacaaatacctaatgcatgaggaggttaaaacctagatgatgggttggtaggtgtagcaaaccatcatggcacatgtatacctatgtaacaaacctgcacattctgcacatgtatcctagaacttaaagtaaaataaaaaataataaaaagaagttcttaattttatctccagggagagagggacataattgtgaggttcataaagaagcaaatgaaaagtgatcatacttgatttcccaaatggatctttgcttgttttaggagcaaggataagaggttgcttatacacctagttttgcaaaaggttgaatactttagccatcttagcatttaaacattgctgatattctatatcccaagccagggaaaagagattctgactaagcaagaaaatccgaacactgaaataccttagttaaaatgaaaagcaggaactactctgggtttctttacaaaatgcaatttttcctctacaaataaactcattggtgctaatcttgtaaacagtggtaactatggcacctaaataaaaatggcactttatttcgttagcatcatggagggtttataggagattactttgaaagatactcagggagacaacttggggattctgtataactctcttaaaagaattcagaatgctctcagatgatagaggaaattaggctttttctgcatgacttcaagtgaattaggaagaagaaaaaatgttgaaggagaaggacattttgttcaagtttaccaaagagcttcccaacaaatagagattatagtgaaactggtggcatttggaagccctaaaagttcagctatgaaataaagtgtaaagcagaggattgaaaattgttgtaaggtatgctagagtggaatttcagcctttggtagaaattaggtaggatgctaggcaagctgaccttcaaagacccttcaatgctaaaattctatgaaaagcagtgattgatttgtgttagttttctaaaaagaaactttcagtatctgtattgcattaagtattgcaaatccaaatgaaatgcattattatttaaaattgttgaccattttaatacaattcattgtgctctctttcacatccttctttagtgcagtgaagaacatgcttattagtatggatcctcatgttccagaagagtcctttttctgagtggtaaatcaagcatgttggtgtctctgcagcaatcccaaatacaacatagcctggtagctggtggtactgctggtactgcttgtctctagcttgaccttattaaaacattgatcagcaatggcctcatgtagcttatttgcacacagcggccccatagtagatatcatttgtttcatgccctagtagttttgcccaatgagtagtttaaaagacactaaacttaaaatcctcacagcactgcaaagatgggagtttgtctctagtttctcactcagttggaatgacaaaaggttagagcaaaaagaggaggtgaatattgtttacttcagtggttctaaaccctggctatcctttagaattgaagagtaaaaaataattaccagagtctgagccccctacttagggattctgatataatttatctacagtgggtgctgggctctggtattttttgacagctccccaggtaattctaatgtgaagccaaggttgggaaacactagtcttttctaatgtttttcttattatactttgttttgttttttaaattgacacataataattatacatgtttatggagtatatagtgatgttttagtacatacataaagatcagattggtgtcattagcagaaccatcatctcaaacatttatcatttctttatgttgggaatattcaatatcccaacagttagggaactgttgtatcttctctcaagtcttttaaaaacttaggttataatcagaatagagcaatttttttaattaacattgggtaaaatagtttctttttttccttttgatatgttcgtttcttaaatttaaaagtaggaaatgtctaaatgtgttcaaataaatgaatgatcaaggccaaaatcagaagcaggttttatattttatggaaggtacttttgcataaaagaatccataaagaacatccagtatgttttctctgagtcctctgaaatgaacaggtgctctcctatttagttagacctctcactactgaacattataataatgtttgggaaagatcagaattaacaatgagtcagtgagttacccaaaattgagtcagtgcttttcttcggagagtaataagataagttgtgaacaaaaactgaggtatgattaaacggaagtagattttcatacacctcaatattacttatattttaggtttcgctcaagtttttcttagcctttatcagcaaaaatagaatttgcttccaacggtgctaatgaagtgttgtcaatgaaggaattacaggggtatagtcaaggtaagggacaaagccagggttgatgcaatgccaagaagctaatgacagtgggaagcctaggtctgaaaaagtaaaggtgcagaaagtaaaacagagttactggggcaggagctgatgcagaagagaagggccactcaatggagctgtgggattggaagtcactagctgttctgcactactaaaaaaataaagaaatgaggaaaaacaagaaaaggaaaaaaaggaggcagtccagagatagagagggatacagaataagtagctatggtctgtctctcttttgccctccaatttcttgctggtatttactgttagccaaatgaaagccaagtggagcttcctccttagcccatttaccagtagagttctcattgactcttttcctcagggctgttttcctggactctgaagtctaatgtttcctgatacctctatggaaacttagggttgcagtgtgttttactgaattcttggacactgcactttgctttcccatctttattagaatgctatatcttatgttttaacttgagtgccaactcttaactattagtagcatttactaaaaaatattctgaatgagctttatgtctttgatatttcttgccaaatcagaggttaaaaagaaaaaaaagtttcagaaactttatagtcttttcccctaaactatattattgcttttctcattttataactctgcaacatgaatttggctataaaataaaaatttcgttacttttaaataataaatacaaaattaatgttttcttattcttgctatgtaaacatttctatgtacttctttagatttctgcgtcaaactttttctttcaagattttaaatcaaaggccagaatttgcttagaggtagatttataaataatgtattaaattaattttttaaacatcaaagaaatcacttatggtattattaatgaaattggaattaaagattgaaatcaactagttcttagttaacatcaatctttattaattcatctattcattcattcatggagctaaatatttattgagtggttattaccgtatgtcattgaatgtaagttgccatcaattttaagtagcatcctgatttcagaaacattaacatgtaaaaaaatgcatactttagaattaatgaataatatgtgtggtgggtgtatttcaatttagaataacttatggttgggaaatagcttatgatctagaattgataaccaaaggcaagcaaaacaaaacaaaaccggattactggagtttcagttgtcatttttatacgttgcttttcttttttcaataagtctgtttatgtcttgaatgcgggaactgtattgtacttctttgactttctctgtggtgtgattacaaaatgtaatcatagaatgttagttatggaagagactttggtgatcatttagtcatctagtccaacttcctcatttatagaagaaggaatcagagaagggctagcttgcctgatcacctagctagttagtagcagagtgaatgaacactgaaattcagttctcaaattcttgttccagtgttttatctattattatacaatgtaggttttaagagtagatatcaatgaatatacatatgcatgttgtacgcttaccgagttcataattaactccaatattagtcctccgcttaggtgctagggttttacttttatttaaccgtagtacaaaaaggcttagtggtatcttttgtcatctttagatatatacatgtgttagtagtaggttttactttagcaaaacttcatccatttcctgttatattaaatggctcattcagtcttcttttgggtgcttttgttcttccttctagtaacaaaaattataacttagaaaaatatataaataatttatatgtatttgtatatttaaaaatagaatatgtatcatttgatctttcagtattcaatccttatcaagcacttaatttttaatttctgtgatgagtgttttcatataatttatgtaattttgttgcacttagtaatgagatagtccctacccgcagcctcctccatcccctacattacctaaattaattagtatacattttttagtcatgtagatacagaaaaagcttgccctgaagctttgcagatttggtgagtagtatttattatgcaaatttcctaagtgttcaaagataagttattttccagcatttccagtaggaaatgattggtagtatttctgttgagtacacaaagctgatttcgcctttgaatttaactatcacactttagcaccggctctattgaaatgttaatgcacatgtgacgtgccaacatttagaaaaatgtaaataaaattggaaagttccaggtgaatttatatgttccctaaaagctgcagaatataattactttttgactttcttcattctggcttaaaagttatagtttcatgttcatttctgcttttcaacgccttgtatcttatgtctcattcacccttccccactaatctcctgaaggcatagcacatgaagcctattatttaagaatgttggctttttagtttcaaaggtttaaatatgaatcttggctcagacttctaactagcgatgtgattttaggtatgttacttgatcttcttagacttagttctcatatatgtagaatattaaaaagattaaaacctcacaagattattctgaacattcagcaggaaaagtaatataatcttttttggttcagagcagttttagatacatttaagctgatatttttattttataatattcacacaacaaaaagtagattgctgaagctaagaaacctataagacacagcaaccacattttcttaatccagtctatcatttatggacatttgggttggttccaagtctttgctattgtgaatagtgctgcagtaaacatacgtgtgcatgtgtctttatagtagcatgatttataatcctttgggtatatacccagtaatgggatggctgggtcaaatggtatttctagttctagatccctgaggaatcgccacactgacttccacaatggttgaactagtttacagtcccaccaacagtgtaaaagtgttcctatttctccacatcctctccagcacctgttgtttcctgacattttaatgatcgctattctaactggtgtgagatggtatctcattgtggttttgatttgcattctctgatggccagtgatcatgagcattttttcatgtgtcttttggctgcataagtgtcttattttgagaagtgtctgttcatctccttcgcccacttgttgatggggttgtttgattttttcttgtaaatttgtttgagttcattgtagattctggatattagccgtttgtcagatgagtagattgcaaaaattttctcccattctgtaggttgcctgttcactctgatggtagtttcttttcctgtgcagaagttctttagtttaattagattccatttgtcaattttggcttttattgccattgcttttggtgttttagacatgaagtccttgcccatgcctatgtcctatgtcctgaatggtactgcctaggttttcttctagggtttttatggttttaggtctaacatttaagtctttaatccatcttgaattaatttttcactcataggtgggaattgaacaatgagaacacatggacacaggaaggagaacatcacacaccagggactgttgtggggtggggggagggggagagatagcattaggaggtatacctaatgctaaatgacgagttaatgggtgcagcacaccaacatggcacatgtatacatatgtaacaaacctgcacgttgtgcacatgtaccctaaaacttaaagtataataataataaaattaaaaaaaaaagacacagcaactaaacgtcagtgccttgggggagctatatgtataattgttctcgcttccgtgaaaagccaggaagacaacacaacttggagaactatccctgaaggaatagcacagagcagaaatacaactcaaaaccagcgaagctatccccagggatacagagaaagagtctgcaagcattttgcaaagcaggcgttgaaagagaaaaaacttccttggagagttgtgtagcagatattagaattaaccaatagatagaaatatagaaacagaattgatgaagaattgataagattttgagagaaatgacatcacatttttaaaaatcaaaatgcagtgaacccctacccatttaaaaatttatattttaacattcctgaatttggaattgattaatgtcctgtcttcccccatcaagttgattttctatcttataatcaagtcataatcctggattggggcaataaaataatatatgctttgctatattaactaatacactttgaacaattgcagatgaaaatataaaaaaaattcttctcatttaaatataatcgctcatacaaacacacttttatataaggccattacaatataggcagaaatgggatatagaatataatgagacactgaagaagagtaatctgggatcatggaaaaggaagatccaaatgagatcatttttcattgctttgatcaattccttaattgtacaactacaaatctgttatttatggtttgtaacagataggtacatgttcagttcactctttggttacctgtaggtaagtgtcacctcacagtgtggctaaatcacttcgaattgaattttttgttgtcttcataaagtcctgaattagaagaattccattcttctatgagacatagatactaaataaagctttaaattgcaagtaagaattatttgacaaagagaacaggctgtggccattctaagaatggtttccagataagcctgtttctgttcggtaactgtgttaacaccctgctgtgttcttacatggtcctctattgtgtattttaacctgggcattgaagtgcatcagcaaagtctgaccaataactccaattgacttttccaatcatgttcccattattgagtctttgacatccaaggaaagcatgtctttctctgagcatcctctgtttctttttgtctcttattttatgccactcataaagcttcgtttattgtgaaataccctccttgacttatctctgtaggatgaaatcctaaccaaacttcaaagcaaatctcaaattgtcactctccaataagatgaattgattatcataacattaatttcttttctcagctcttccatagcatatgattatacttctgcctttagcattttctacagttagttttgcattatactattttctagatttatggctctgattatctacagttctgtctttcccagtagaggtcacacatttattgagcacatactatatttggaattagcagtgttgaaatgagatggccgtattccttgctttctcagatctcaagtctactgaggacataaaaaggataatctctaaaatggaatattggtaccattatagataataatagggtgtcatggggctaggaaataatgtgggcctgggtcagaaaaaacttcctggaggaaatgaaaactctgtaaattggcccttcattgtatctctcacttaaaccattttgggtggaattatgtttcctgtgaatccttaacttatatttatgattacaaaaaataagatttactcctttttgattctttgtgtaaagctctgttataatattccttccattcttccttatatttacatgtatgtgcaagtgtgtgcatgtgcatgtgtgtactatgtatttttgtgtttgctcatcgagggggactttgaaatcttgatcagggtatacacagtgtttctttacacttgttactctgaaattatctgtttcacgttcatacacttttacaaggctctgaattctttttgggcaagtgccaccaccttctcataatcatagccacaggtggtcagctcatatagggcaggcaccctgtaaatgtgttgagctagattgattaatgtgtctatatgcatttttttttcctcaggagaaaaaggtctgttgaaatctttagttggaatatgtgaatattcttgttactatatatagtctgtaactatatggaggaaaagctttgagggtggaagagacatttgcaagctggagaaaaaagaatgtgtcagtatatgagggaatggtagagggaaaagtagatggagtgggaagctgggggcggtgaaaggtggtaaagtgagacactaagtgacaataaaccatttaaaaataatttgtcccaaagttctggctattctgaattcatctttgctgagaaattttacatttttggctcaccttttgggaaggtggagatttaggctagggaaaaagtagacaagtacaagtttccatggaaacaattaccataaaatatcgaccaacaaagatattaggaagcaggaaaggaaagagaaaaaagcaggaaagagatagttgccatggaaacatggacaatcagagacatgcacttgaagtgattccttcttatttattttagttaaatacctgattaaaattgttatactttagtttgtggtttatttttaaatattcataaagatttgtttaagaacatgtttttctatcttggtaagttataaattcacaggaattcagggaatatccttttattttgattggatatgacatcattttattgattacaaaatccatttaaaatatggcatttaatatataagctatgaaagcattattttataaaaatgactgtttaaaatttactctttcttcagagtaaattatgttaataatttttcttaatgaatgttaacatttttcttaatgaagtttaaattattgcttttaatttgcattgactagcagcataaaatactctaataatattaagagagggtcattccaagcattttgatacaataaaagcaggctcactttttctccaaacaattttgtatgacttaaattttgagatcctttttaggtttacaattttattttggttattttggctgtccacttactatataaacatgaaggagttactattaaagacaatatatctgtagtggataattatataaagattagatgattcaaaactgtcccatctatagataaatgcaactcagagaaatttggattgataaagcagaatattaaactccaatgttggctataaatttgtaggattcaattttaaagttccctttgaagagtactttgggaatatattctgaaatgatttcttattttttcattgctgtaaaactgaaatgtaaggagcttacatcatttcccaccagatactgataggaacttaagtattcccttaagtgtcaacttaaattgaattaccttttttgagaattactttcccctcctggctgtcacctcttgtcatcttctttggcatccagagttcagcattctaaaagaggagcatgtagacctcctgtggacagcttccctgttatgacagattttttgtatcttaaaaagtagcttctttagatgctgtaagactacgtgttatcgataacctttgcaaaataaagcatgttgatttttcagactctgtgggcaactgaaaagcccttttgttttcttaaggtcatagaactttataggtaggaggaacttagaggttaatttgtacaactctttaattttaaagcggaaaaatttgaggtacaaagagcctaggtgacatgctgaaggccatgtcgcctgtttgtcagtttagtgttctcttcacagcaccagtacatctccaagacatggcttggctatgttttagcctacaccttcatctctcttaatctacccctaagccaccacacgtacatgtacacacataaaccgctcactatgcacaggaagctttaagccaaatcattcactgcatgcttctcctataaagaaaattctgaaggtccatgaataccatgtaggctgcttaagaaataatgagcaagcattgaagtaaaagagtggtgtccttatttctaagtagaattaaccttcccctccaaaagatacacatccacatcattatcaagtgtaaaagacagctgatttccaaaatcatttgatttggactttccttctcttttcttagtgctaacatttttcacccatgttgctaacattttttcaaatgtgtggatatttccttataatttctctaagagaaattctactactaaaatgcttttaccaattttagtttgtagacttaacatttctgggggaaaggagtgcaagcagctaggtggccctccagactactaacaagctggagagtggagttttccctgttaaagagtgactatggctgttttgagaatcttggtgcctatacaatgcagcctttcaaaatggttcccacatggccaactcactaggattctctgtctttccattctagtttagttattaaattacacagaattattcaggtatttagtcctaaatacctgctctgttctaggtaacctgctaggttctaggaacatcaaggcaaatcatatatggtccttgtcctggaattttttcagtctagtggggatcaaagtggaacaaatagaaaataaagtataatacattgccataatagaaatgggatctcagagcaaacacccctaatgcacatctgtggaaactgtaggattgatgaaggtggaggtgaagtaaacaaacaaaatttaaacagcaaataaaaaaaatcccacttctctaacacaagttgtattcagcctttagcccttttttttttttgtacattcagccagttccttatagaaacatatttgcccttgtacagtgatttgacaatgccctcgctggggtttgatggccaggcctgccggatcttgtgattctctgggacagggattgtgtcctgctgtgtctgctgtgaattggtgcgcccaacagattgaacccttccatggcacatctacgcacctttctttacaatgtcacctagtacttaagagcaatctgtgggattaggcagatctgtgtttgatttgaggctttaccacaaactgtctacattatcttgggcaatgagactttatttcttcaaacctatttcatgttattatggtaagaattcaatgagacagtgttggcaaaagttttagaagagtacctagacaggaaagtctcaataatatgtcaagtgctttatgatgacacgtatgactatagaagggatggggaaactaggtactagcagtcttaggagcccagctctgtacacccagctcatatcaccctcctccactctctcttgtcccacctccctttcctttcttggcatgtggtgatgcaactgtgtctcccccttgtgctttttgaaaaaaaaatatttgcagccagctccaagttttagttggcaacaaatccgatagtaaaccagataacatgcttctctccaaagtaaatataaactgtatcaatagaaatgtagtttttggaactctggaaattcttctctggcacccctgtggaccatatttgaacacttagcctagtttcagatgctgcctctaaggacattaacaaacaagaatgaatcctaggaagggtgtgtgtattacttaatggtatgaaaaccatatcatagaagaaaaaagttcaaagacatagagataatagtgtggaaaggagtagacccagggtatatgagagctaaatttaatacagatagggctttaatgtcgagtgcagtgttccttgggaacttcaaggctggaatccctcagccattgcttatatgttttgagcactgtaattcgataggtggatagcacctgatcttcaggcaggcaatcttacccatttcaggctcactagctgtgtcagagaaggttgtggaaatgtgattgctcatggatatgtccttggaagagggactggaagacctttggtttaatgaattcatctgcacatttataatggtgagcatatccaaatgttttcttggtcagaaaaatttaagtattaataataccttccttttgtgaggaattgtcaggtcatgcttcattttgctcaataattattttatctcctttctaatagtgctgattaagcactatttcatttatttaagaaaagcttactgaacggagatacttggacaaaagagaacaaagcccatgctcgttgaaaacctaagtcctatgagcaatgcctttatttaaattgtactaatattacacataacaatatttaccattttaaccactttgaaatttacagctcatggcttttagtacataaacactattttgcaaccatcacaaccatctagtttcagaatattttgatcatgaccaaaagaaattctgtacccattgaaccagttgctcctcatttccccctcccccagtccttggctgcactaatctgctttctatttctctctatatgaatttgcttaagttgttgttcatatgaatgaaatcatataatatgtggcctttgtgtttgtcttcttccactcagcataatgttttcaaggttcatctatggtgtagtatatgtcagtacttcattcctttttatggctgaataatatttaatgttatggattcaccatcttttgtgtatctgtttgtctgttgatggacattcgagttgttttcagcttttggctatcgtgaatagttgtgatgtagagcaggtgagcccccaaattgggtcttagcgcaggagggtttttggctctgcccaggaaagaattcaagggtgagttggtgatgttagacagcaatttttactgaagtggcagtgcacagcagcagcagaagtgttgtttcttgtagaggagggctactccacaggcactgtgcccagagtagccctgctcttcaaggagtggtacctctgctactgctatacactgccacttcaataaaaattgctgtctaacaccaccagctcacctttgaattatttcctgggcaaagccaaaaattatcccatgctaagccccaattttggggttcacctgccctacatcagctgggctatgaacatttttgtacaaatttttgtttgaacagctgtttaaaatgcattgggtgtatgccagagagtatcattattgctgggtcatatggtaattctttgttaaacttattaaggaagtatctatttttctaagtgagatttccaggttttatagttactggtttacatgcagtttgtggaattagaaaaggttctcagggcctttattccctctttttgagagatttagcaatattctgtttgacatgagaatttctaaaaatccatttataatactgaccaaaattataatcctgtgaataaatttttaggaaagatcttatctaggaggggctttctatatgccctacatatcattcccatttcacaaggagttgtgcaattggagccctggccttgctgcctcaagttggtctctggcaccatgcaacgggaagaagacctctgggctttgtgagctgaactttggctcatgctcatgttcaccaagcagaaatgttctttccaatttttaggtttttcaggagaaactgaatatctaaatttttatatgatgatcttctatgtttttaatgccggcaactcattcacatttaaacaaaacaaaacaaaacaaaacaaaacaaaacaaaaaaaacaaaacaccatgggccaagcaaaacaagtctgggagctgaatttgatgtgcaggccattgatttactactgctttctttttctttctttcttttttttttcttctaacttttgttataggttcagatggtacatgtgcaagtttgttatctgggtatactgcgtgacactgaggtttggagtatgaatgaatccatctcccaagtaggaaacatagtacccaataggtagtttttcagcccttgcccacctgctcttcttatatttcccagtgtctgttgttctcacctttaagtccatgtgtacttgatgtttagctcccacttgtaagtgagaacatgtagtatttgggtttccatttctgcattagtttgcttagaaaaatggcctccagctgcatctacgttgctgcaaagcacatgatttcattctttttgatggctgcataattttccatcgttatatgtagcacattttctttatataatccagagttgatgggcacctgggttgattcagtgtctttgtgaataatgcagtgatgaacatatgagtgcacctgcctttttggtagaacagtttattttcctttgggtatatactcagttaaggaatttctggatttaatggtagttcaacttttagttatttgggaaatctccaaacggatctacacagtggctgggtacatccccaccatctgtgtatgagttcccctttctctgcagccgtgccagcatctgttgcttttagactttttaacaaagaccattctgagcagtgtgaaatggtatctcattgtggttttgatttgcacatctctgatgattagtgatgatgagcatttcttcatatgtttgttggatacttgtatttcttccttgagaagtgtcctttcatgttctttgcctactttttaatggggttacttgtttttcgcatgttaatttgtttaaattttttttatagattctggatgtttggcccttgtcagttgcatagtttgcagatactttcccttattctgtaagttgtctgttgactcccttgttagtttctcttggtggcagaaactctttagtttaattaggtcttacttgttaatttttgtttttgctggatttgattttgaggacttagcgtaaattctttgccaaggccaacatcaagaagggtatttcctaggttttcttttaggatctttgtagtttgagatctaacatttaagtctttaatccatcttgagttaatatttatatatgatgattggtggtgttcagtttcattcttctaggtctgattgctttttctttatgagcataccaccactcagatgattacaatacaataaaatcaataatagctaatgcatttatgctaaatactgtgttctggcactagtgtaaacatttaacacgtgtcaacttaatttaattctcatgacaattcagtgaggtaggtgtaattttattgccattattgcaatagcacacttttcagagtactttggttatttatttatgaacttgatttcctttatatgttgaaagttccttgtgggcatgaaccacgttttacttacatttatgacctcagaactgagtccagtgcctaggatatgtagatattctctaaattttggttaagtgaatgaatgaatggtatactgccctgactataattctggtctgccctgcaatagtaagaatactcactaatatttaaggctttctgtgtgtttgggacagtgccaggtacttctgagagatattaatttattattaaaggccacattgtgaagaacttgggttctcagtctctagaaataaatagacttcccgattcaaatcttgcctttaccaatttttgtttgtgtgatcttggtcaaataacataactctatgtactttattttttatatcttcagatggtgacaatgatgtaataataatcatacccaacctcttcaaatgattatcacattctctgtactgttctaagcaatttgtaaaaattatttctcacaatggtagccagttcgtggattttgtgagaattaaataagttaattcatgtaaagcatttatattttgcttggcacatagtaagcactgagaacagttggttctttgtattataaccattttacgaaagagaaaattgagtagtagagatactgagtccatttttttaaggttgcatggctagtaaactacagaattgaaattgagactgctttctaccttgcttaaagcctctttctttctttcttttttttttttcaagatggagtcttgctctgctacccaggctggagtgcagtggcataatctcagctcactgcaacctccacctccatggttcaagcaatttccctgcctcagccttctgagtagctgggactacaggcacatgtcaccacgcctggctaattattattattattttttgtatttttagtagatacggggtttcaccatgttggccagactggtctcgaactcctgacctcaggcaatctgcccacctcggtctcccaaagtgctgagattacaggtgtgacccaccaagcccggcctaaagcctctttctttaatcaccatgttgtgcagcccatctccttatatacactttccccttttctccacctatgtagcatgtgcttaatctctagaatcgagacaaaactggttatttctcccttctccaacccattctagtgtttactgggcaattcgtcttttaaaaatcatgacagcttcctcattatcactatcataaattgtactttaaatctgttcatagatcttagatcttgtcttttcatttttttctgcatcacagcctagcacaaaacctcatatgaaaagcgcataatacgtgagaggttctagcaggtgggaagaaccactttatcaccttcatcaaagaacactcctgttctcttcaagtgtgggccacttagagttttggatggatgagcataaaggagagaaagagacccaatctaacccccacaatccactcatcaattcccttatttattcaggaaatacatgtagatataatgaataaaccctgatgataaaaaatgggatggattttgccaccagagagcctgcacatctttctcttatagtgtatattgattctcttaaaacagaattaaaaatgaaaatgtatgctctgaacacactctctcactgtctcggtttctgtctctccctgcttcttttctctctctctctctctctctctctctctctctctgtctctgtctcttggtctctctcaatttcatttaatgcttttttattttcagtggaccctggggagtggacaagtatttctagttaaaatataactatttatagttaaactcctgctgattgggtcacagttacactggtgccctatttggtgacttgagggagcttgaggatttggaccctttatctctgtcattttgtatatctggcagcctacaggttacatgtgaaatatgccacatgaacctgccagtgctttaagttcccagcagatattctgcagagtagtagcacatcgtttttgtagtacatctgtaatgccatgtaatgccactcaccaaattccagcaaattaaagaaacttcagagaattcaccacaaactgattagagaatagaaagagttatttagagaaaagattaaaggagctaattagcacagcttgatggagtggggactaaagggagagctaatggctctttgatattatttgaagatactaaatgtcaaggaggaaaaaatattttgtataatgcaacaaagtgctattaagagcaatgagacagaactgagaatgaaagtattaaaatgaagtatgtgagaactctattaaaatacaatttgttaaattgtgaagtagtctttccaattatgaggtagaagatcttcctcaaagaaataaaaatacacatataaatatatactaacaagctttaatgaaaataattttaatacttgttggacagtttaaatggcctgctgttttaaacgtttattaatttcaaatttgagcaattatttcatcccaacaaaagcctgttctgtcctcagatatttctacatatcctgaaaaaccctaggtctctaactctgtaagagaggctgagaataccaatattttaaaaattattctttaggatttcgtttcattggcacatctctgagaataatgggagctattgaccagattgacatttctgtggttttgtgccatggcattttccattcccaagtgagaaagttattccagttcatacagaaaaaattgtgtcaaagtgttaccaaccaaattccacaaatcaccatgacactaccaatagaacatgcctgtaatgtaagttgttgaaaactgagcaaataagatgcgttgacaaaaccagtcagtctaagaatattgttatctttttaccaagtgaaaagatactgctttataacttgaattgtagtattggggaaaaaagggaaaagaagagacttcattacatgagtaaaattcaaaacataattattgaaaacattagcaaaggttttactgtttggatgttattgcagaaatagcctgagtttataataaaaatgataggaagtctatagaaaacaaagtgggaaaagcatgtcttcgccagtgtgtccccaggtgctgaggagccccatcttagaggcaacatcaaggtgtcaccatgtgttacaggtacactctggccttcttatcgcttattagagtgttggagatttttattttgaaatattaaatgtatttttcttttcttctttgttaacttttattttagaattgtgggtccatgtgcaggattgtcacagaggtatattgtataacgctgaggtttggggtatgactgaaccatcatcctggttttgagcacagtacccaataggtagtttttcagcccttgctcctatccctctctccacaactagtaggctccagtgtctgctgttcccatctctatgtccatgtgtatccaatatttagctcccacttgtaagtgagaacatgttgtataaatgagaaagagatctcccatcttccatttggtccttagtccagaacttctaaaacattcttccattttttgtggtctgacttactcacggctactgcatcttttacaaagctttctccatggtcttttgctccatgtgaggaaattcaattttagtctctatttcttccttttcccccataaaaattgctgtttagtcataagagataaggcatctaacattggcatcaattgagattaattcacctactgcatatgtctcttctgttatcaacgttctccatttcattcaaaaacttcagtgctaggtcctcttcacttgaatgttaagtcccaccagcctttgtctgagaatcttacatagatgatattccatgtcccaaacattctgaggtctacactttccacatagaatttcaacaaaattcaccttataaaagaaatttagtgaaaataagtctctttgaagtaatgtttaaaaaatctcattgaaatatatattctaataacatctatctatactaatttctcaagtagaataaagtgtatataataaataaagaaaattctatgtatggaattagcaattcaattctatattgttgatgattctaaaggaaatttcatgttttatcaggaaccctggtagcaatatgaactagtagaaagtgtccagcctatagtagtagtactggagagatttggtcagtgttgtaacagtttgctctgcacgacaggtggatatataaaagcccatcttttctttactataaaacattctacacgggagtgaaaagtaaaactctctctctctctctctctctctctgtgtgtgtgtgtgtgtgtgtgtgtgtgtgtgtgtagctatgaatactctggatttgcaaaaacaccactttgcccattaaaatagcatgtactcatttcacaagtcatctagtctaacatgtcatcagattcctggaaaggaagcttttagtgaaatactctttagatggactaatatattttatacagtcttataatacaaaaggagagttggaagggcatatgcagaaagaagtaagaaaataaaatcagaggagcattaaaacaaaggaatatgatagcattcactcccattccccaaatcccagcattgattaacctggtcctcattgcatacttcatcaggtgctactttgcagtcttcttttactattgacttttatgcttattttgcttttcacatctactgtcctctactggctgagaacaaggagcctcctttgttctctctgggctccttgcttatccacagtaggagagcattttaaacctaagtgaatacctacctgtggaatcgatatgaagattaaattcttatgaagtacaaggtataaaaaagttatctggtttccattacttctgtttctcttttgacaggactttctctttttccaaggcccattcccatttccttgagtaagtgtataggctctggcatcagaagacatgggtttgaatcttggctctgtcattttctagttaagtatccttgggtaaattggctcaatgtgttgtgcctcattttgtcagttttaaatggagatagtactagtatctactgtataggaattttgataggattgaaataatatatatatatatatatacagtgcttataaagcgctcagtagaaaggctcaataaataaatatttgtggtagtcattaataatatatatttatccatttgatttgttttccaagaacaaaatttaattcattattcactgatgaaatttgcttaaaaatattatgagtatcatgtaggtttgaaatactatgctaggcatctgtgaacaagacagaaattgtggtttttctgtatgagttcagaatctagtgggagataaagacaagcaggaggcaatgggtaggacaattactatgattaggcttgacctttgactcattcatccctcctccatagccaatcacaaaatcctctccaaagaaagaaatattttcttcaaagtatttcaaagtctctcctttgcagtcttctgccgcctccctcatcctgcagtttgttgttgctttgtgcctattaccacaacagccttctagttagtgtccatgcctatagtattttctccttcattctctgcctgcgtggccacattaatcttctttaaacaatgctttcatcatgtcactgccctgttcagtaactttaaatagctcgcttgtgcctcctctgtcaagtctgaagctatctgctaacttataagaccacccaccatcagtccccagcctaactatataatcattttttccacttctcctcacagtatagcaggcattctagtgagcatgaaaactgcatgccagggacactcaatcctacctccagacttatcactattgtcatagaaatgactaacctttgagtgcttaaggggtgctaggtattgtactcgctgttttccacagtttatctttaatttttataaaaccaagattcttcatagaccttattatactgatttacaaatgaggaaaagtattctgagagggtcaggaatccaggatccaaatccatgtctgtttcatctcaaattcctccttcttttcactgtacctcctccattccatgccgctcatttgacccagaatgtttttctcctcattctatcaatacaaaaaccttaaattatctccataacctaagtgctggtttaagttctatctgttttggaaaatcactaactctttggaaaatctgtaactctcccttcactaatttccttcattgttaaactcctgaaatgctaaccatcaatatcaccttgttcctaacctttacacttgtatcatatggtattattctgtatgtgccagtcttctttcttcagctacattgtaggtatattaagcatgaacactccatgttatgtcataatctctcagatgagtggcagtttttctcagcctgaagtgtatacataatacacgcttgttgataggattatttgtcatcctcagccattgagttatcttattttcttgggtccatgcggtcagtacagaaagggtaagccttaattcaatttaaaaaattatacctcttacaagagagatagaaaatataacaagagagtacatgttggggtgaaagaaaatagaaaaataaaagtggggacaaagttgctgggaatgtgactgaaaacatacaatataatgctggaggtaggtcctgtttcctatcagtcaaaggtgaaaaaacaggagccttctctcttacaaaatgtattgttcagaagataaaacgcaaatcaatcgctcataagcagtaaatctatatttggtatcaagaccagacagaaatttctccccatgcgttctcattaagaggaaattgagtaaagtcgtgaacacccttgcaaacattattacagtattaacaataaagagcttcttaggaatctttcttataatgaccctcagtctggccaatgacatcatagcaacaaagtgaaatacattaagaacaattcctcaggtggggaccagagcaaactctggtttagaccccaagaaactcatccagtagaagggctgagggatcaaccctcaaagtaggtgctgttccaaatcaatgctctaggggtctggaagctcaggtgtggaagtgaggatcagatatggtaggtctggcctgcttttagtcttttttcaggtatgtgatagtatcttcattctacttggtgatctgtctaggttttagtagaaatttagactgtggctagcactacagtggaagggattctctctgctgggaacaaggcagagtcccaagcattgggctgaagttacaggcatagttcttgttttggttggaaacagaggtactgatcaagaaaccaaagtgaacagccagtcacatgcatagagttagggcagggatggtgggggatgtgggattagcttgatggacttagggatgtgctggttcactcagttaggatgcaccaagtatcacgattagtaaggatggggctggaaatatacctatgccaggctctgttctcattggctcagcagtggtccccagtgtgtagaacggaatcgcctggggatgcttgtcagcatgcacatccctgtgccctacccaggacctcctgagtcaatgtctttgcaggcagctgcgggtttaacaacctccccaagtgcttctgatgtagactaaaatttgagaaccattgaattagggagtaagtggatgaacctacaggtttgagatataagtatctgttcttaggctgacttgaagctaacattggacacagagcaattttagtgggacttagaggaatagacaccatcaaatttttcataaagcattgaatgatgaaatggcttggaagaagtcattgagttaaaaatggaatttttatgacagaagtgcaaacaggaaaatttaaatgtcctcttaataatgagagaaggtgcacatttaatgaatggggaagttttaatatgagctagcagcacaccctgcgtttaccttcatggaaagcagctctcagagcacctgagaagttttattttgggagaagggagatctagagggcccacatgcagctagggaaataataacttgacagcagatgaaaacaaaatgataggttgctgtaggaaacagagtggctgggtactctgactagaatgtttccctggttctgaatacattataactgcaccagcacgaagatccagggcatgcagtacatatttcccttggtcttgacaggttatggggaatcatgacaagctttgccttgtcaaaaaatagatgttttgactgcaagtttgcgcacctgtctttgatgatgaggagctcatcccacgctgctgcttgttgtgttattgtttcatttgtttgttgtgatttaaaatggagaaagaaaagaattggggaaaacgtttgaaccaaagcaatcagataacttcaataataaaatgctacccaggcttttgtgataggaaacctatgcaatcccactgctaattctgttctcgctatagggattcatggagcctattttatcagctcagtggggttcaatgtctctccactccgatgggaaaaaagtggaattatcaccagggtaatgaaaaacaccccatcccatgtttatagcatgttttattaaaagcatgttgctttggcctcatataccaattgcaatatgtgagtgtaagatgccagaatagctctcaagggaagcactttccttcgtgctaatttaaaattcctcgaagagcacgcagtcaggtgtggtgttaatattttgtatcttttctacctgagattttcataaaggagatgataggtggagtagagtaaagggtcagctgagttttggagccacctggccagggctgggaatttactatgatttgctttcacaactattctttacatttctgatagcccacactctcttattttatgtcataatcattagggaatttgaatgagtgttcctattatgattaagtaaataacattttacttataatttctgttaataaccacattttactttgtataaattaattttctattatgccagtggaattttcacatttgactctttgtttctgcgaaccttaacccaatgttgatttttgcaaactccaccattagttccttccaattagcatttcattctccagctcatctttatcctaattctttcaaaactttagggcccatattaagttctaggacaattaattcctaccacagtgtgtagttgagtagaggaggtagacttgtaaagaaataacaccaatatagtgtgacaaagataataatagaggtgtttaaagagagaagtttaattgagaagagtgatatttcagttaggtcttaaaggactgagtggaaattcaccagactttgaagagaaaggtgcttatgcctgggagagagacctgcatgtacaagggcatggagttatggaagaacagagtgcttggcatgttcagagactagtggataagtctgtacctgttctttatattcacgtattgcaaaagataaagccagaaaggtaggatcaaaattgtgaagttccttatgttctatacagttgggcttggtctttctcctatgggtattgaaagggcagtcaatggcaagtaggccagtatttttaaaagtatcttacaaagattactctggcagaagtatgcaaaatgatctggaacagtccagactagtggcagggaagtcagttaagagtttacggcaatatccttcgcccactttttgatggggttgtttgtttttttcttctaaatttgtttgagttcattgtagattctggatattagccctttgtcagatgagtaggttgcgaaaattttctcccattttgtagattgcctgttcactctgatggtagtttcttttgctgtgcagaagctctttaatttaattagatcccatttgtcaactttggcttttgttgccattgcttttggtgttttagacatgaagtccttgaccatgcctatgtcctgaatggtaatgcctaggttttcttctagggtttttatggtgtccaacaatgatagactggattaagaaaatgtggcacttatacaccatggaatactatgcagctataaaaaatgatgagttcatgtcctttgtagggacgtggatgaaattggaagtcatcattctcagtaaactatcgcaggaacaaaaaaccaaacaccgcatattctcactcaaaggtgggaattaaacaatgagaacacatggacacaggaaggggaacatcacactctggggactgttgtggggtggggggaggggggagggatagcattgggagatatacctaatgctagatgacgagttagtgggtgcagcacaccagcatggcacatgtatacatgtgtaactaacctgcacattgtgcacatgtaccctaaaacttaaagtataataataataaaaataaataataaaaaaaagtttacggcaataattctgagactagctgaggaaccacagcttgagctgaggttgttgggttggaagaacattgctaagtaaaggttaaatgaacttggtgattgcctgtgtgaagcagagaagaggggtggggaggacacagtgaatctgaagattctaacttagggaattggctggtgctatgtcaactcagacaaggcatctgtgagaagagggctatttatttattttttaaggacaggaagttagtaagtcagttttaggatgatgagatccaagaacctctgagtatccaactggagatgtttagtatttagtcagataaagaagcctggggctcaggaggaaagtctagacaggagacatggatttgggagcatggggactaattattggtctgcctgaatcatgaattcacaatgctattaatataacctattcgtacagctgcattacatagatgtctcatttacagattctactctaataattcttaaatatttttacattttttgctactgtgtcagatctaccctatgctatacttgtatttttgcacctttttagactaagtgaagtagaagcctgttaatttatcttttttcaatgtcaatactattgaatattcaacaaagaagtggtcagaacttgggcttcagagcctagtagtcattggggctttttttctcttctcccggacacaatgccattatatccctcctcttcccccatctccaagtaagatttagctacgtgactagcttttagctcttgaaatgtgagtagacagatcatgtcatttctaggtagaaactttaagagttagtttgtgattcatcacatcctttttttctgcatctgcagccttggagatagaagccctaccaacaagggttccgaagtgactgtattgagcagagttctccatatgacccacattagacacgtagtgagaatgagaaataaaatgtactgcactaagccactgagattgacattgttgttatgaaagcataagctagccagtctggttggtaaagaggtaactagacatggactcaagtcctggctctgtcactaactgactaactgtaaaaaagttacacaacttcttaaagctccagtttcttcatttttggaaataattatactgaatttgccaaaactctgtgagaattagagacaaggtatacaaagtaccttgtaaacaatagccatccgctacgtagccgctattaaagtctgcatccatcattttagatagttactcaattttagtgttttgattttgtaataccttatggtggctatcgctctcagatttgtgttgtgttcagatttcttgaaaatgttttctccatgtttatctgagaaattgttaaaaataaaaataatgaaagcaagatatggccaaggacaggactgagtggtcatgctgacatagatcttttcacatttattaatggctgtctttagataaagttgtaaaattaattcaccttgcaatggccccaaactccccatcttgtttctgaggatacagaggtttttttttcataggtatcctataaaagagttgcttagccagtcaccttgctacgactgcataagatataatcacatcaacttcttaaacatttgtaaacttcttaaacatttgtaaactatttgttttgtggtatgttggctttttgtctcaaacagctgattgttctgtgtattatgaagtactcaaatcatttctgagccattatctttgctcacaggataattctacatcaaaacttctgtcattatgctattatagagttatttttctatcatgatctgattgcctgcttatactatccaccttatttaaaatgcttcattggtcacacaagattttatctatttgtatataaactaaaattcaaaatctacttatggaaaaatatctcctatacccttgatctatgtagatgacaaactcaactcttaggaaagagaagaagggatgataggaattacatctcataatttcattttgaaaaacaaaagttggttggtatcatggaagagacaggaatttcaggagagagtgaccttagctaatatacagataacaaaactgtagaaagacaagagtattaataaggcaaatgtatttgtagaatagcagaaagaaaggattaccttcagaggtaggcttggtataaaaggaagtatctcttcttatgatggacgagctataaagctataaagcctatttcttccaggggtgatacagctggaaatatgcttagattctaaataggtttagatagatttataaatacatcaataatgtaccatcaagggcaggacaggtcataggaacataaatatgatatttttgaggggaactttgggtggcctatcacctcatactcttaagagaagacttatgttggatggttcagcagcttgaccaattttgggacattcctttgttcttataagtgttatcatagtcaaattactcagaggaacaaatagttacaaactccccgaggtcttagatgacaaaattatatatatatatgtatataatatatgtgtgtgtgtgtgtgtgtatgtacgtatatatatgtatgtatatatgtgtatgtgtatatgtatctgtatataagtatatgtatatatgtgtgtgtatatgtatatgtatgtatatatacatatatatgtatgtatacatatgtgtatgtatgtatatagacactgacattactcataattaaaaaacatcttaacatttttgagaaagaggcaaggacttcttttacgctgtatgacgggaactagagaatgttgaaagtcataggtctgaaaatgtttaattacaagtgcgttttctttaaaatctatccttcagttgagatgacagtagctgtcaccacacccctttccctaggtagccaaattaattgggaaaagaaaaaatgtgttcattggagtggagtctcacacactatcacagtgcccttgacagcaccctgttgtggcccctgttccacctatgtgatggcctttcagacatgacaaacagtttttctagtttctttaggtgaaaagatttaactgccaattaacgagacaccctaggtttaaaaaaaagtgaccgtaacttcgtaattttattttcctagcatctgttctattcaagccaagcctactgcggtgatcttcatcaagacaattcaggggtttcctagcaaccaagtttcctgtggtttccttggttatatgtaatgacataactcttatgggcaacttcacaaaaacacagaagaaagccctcctaaagaatgaaattccaaaaaaaatcaggttactgctcactgagtgtctctgtttaaaatggagaaatttatcttcgtgaatgttaatgacactaataaataattatgtagcaattgcaaagtaaaatcacatggttatttgatttctttcattgtttttgttatatgcctgatcttaatttgatttctgaaatcaggatcctttttccatctcttctaattgactgccacatgcttagacatatccagcagatgaaaattagacagttaaaaaaattacatgagaggtcatttattaaaatagcagagttgtagttgctcaagagtaggaaccaataatactgcctgttttttactaataaagtatattatgaggtttgtatggcagtatcaagggttattggtggaggccattaaataactgttaatgtatactgagaagtaaattttccatgccagcatgaccaacattagctacttttatgtacttaattgttttttccttctatattcacaaagacaaattatactgggtaactgtaatctttggtgatatatctaatatccataatatgtcaaccaaagaagaaatataaatttacacaattaagagtaaaatttgtgcaacatcggctattcatccttgcattttcagtgcctatcatacaaggcggcttgtgataaatataaaatattggattaatgaatgaccagggctcaacaactcctttggtttttccagtggaaatcagaatttaatatgaggatccccagattaaagtaatgcacacttagaaaaggagaaaaatataattaatacatcagaaatttttgagttagagtacagtaagtcctcacttgttgttgataggttcttggaaactgtgactttaactgaactgacatactggatagtagaactaattttaccatagtttaattgatacaagcaagagttcagttcctacagcatacagtatatacagtaccttgtttcccttaaagtcacacttttcaagaatctatccgtgaggacttaccatatatattcctctgcatactattcatttattaattaaatatttattatggacctattaggtaccaggttctgtgccaagtgctcagagtacaactgagaacaaaattaaatatgattacagcctcaagaagcttgaaaattcaaaatgtttaggaattataaattagctaaatgataatacaaacaaaagtacaaatactgtaaagacaagatactgtaaacacaagatagattaagccacgagtttaacaaagaaacctcttctgatctgggggtagagtgtccagggatagcttctcaaaggaagtagcatttaagctgagagatgaaggcctaggtaagcataactgggagaaagttgggtgtgggtggggaacagcagagacaaaaggataagcatgtgcaaagactttagaggagcccaaagaagcagagagacctggagttctcatttctgtcagtgggaatgaacctagaatgagaggagatttcagagggtttcaaaaggattcctataggccatgttgagcatttagcagaaacaatctagaaaaagttcggaaatgtggttcatagttacaatttaacctttgtagtattaaatgtatttaaaaaatcacctaagactttgatctgagggtgaaagtttaattctgaagttactgaaatagttgagccccagtaggacagggtttgtggcatgaatagggcattcggacagactgtgctcatggactaggggtcaaaccaaggagaagctgaagtccagcagcagtgtcaattatccaggcaggaagattgaaggcctaaggctcagagcaggcaaaaagcatggtaatggggtggggtggagaaaatagcacttatttaagatgattttattacgtatttgtatatacattatttcatttaattctaaaaaccacatgatgaggtgggtattgctttctccctttttatattaagaaactgagaaatagaaagtgtaaaaagcataccctggatgacatgataccagtgaggctgggattaaaatctaggactttcttgagttctaaaattgtgcttttttttcagtgtaatacattatatttccactcttctgtgcagtaacttgggtcagagtcttgatatcaatatggaccgtatgtcatagctgaccacagccaatgagagaggaagatatttatcccaatcttgctttcctgaggcttctaaccaataagctatactaagcctaacttagttgaagaaaatgccttctttaactttatttaaatagaaccacttatttatgtatttatttatccaagaaactttattaagttatctttaaaatcacatgcttagcaatcattttgaaagtgatgcatttggtatttgacgtattcaattctgcattgagatgaggggaaaaaaagcataacacaacttatgccgctcatatcattaagacaaatatggaaaagtagaagggacccagaaatcatttgggcccttgatgttctttcattcattcaatcaattttttattgaacttctcctatatgccaggcacagttttaggtattctggatattccattgaacaaagtccttgatatcatgggaaatagacaaaaacacataatctaataaattataattcatagtcaggcagcaagaaataatatgaagagaaatggatgagagcattaaaaagtgatcaagtaaggcctccctgaggcagtgaaatctgactagagaccagaaagaagctaaggagtgataaatggaggaagacaattcaaggcagagtgaggagaaatctcaaatactgagacatacagcatgcttggtaggttggagaaatgactgcgcttcagattttctgaaaacttagtgattaatgatttttcaagctaataaactgagtttacaatccttgtataacagaagagactcaaagatctaccatttagtcaaggagctatgcagctgaaactatataaatccaaatctagcctcatttaatatgaacaattgtgttaaaatcaacttcttttctgcattaagatttagtcctttaaagttttcaattagcaatgactgcgcctcagataaacctcattggctatgatattgctactgtgcaaagctgatttagtcctttaaaaactaaaagccactctcttggcttacgaactttgagaatcactttagaattgtttaaggcaaagacacaaactgggttaatttcatagtaaagatggttctctgttgtttgcacagtattttattaattccagaatcatggaacattagaacttaaagtgatatctgaattcatctaaagcaccataatagtagctaacatttatagggccagctggcattctaaatgcttgactcatattagcatattttgtcctcataacctttgcagacataaatattatgcctctgtttttaaatgggggaaactgaggaatataggggttaagtaattttcccaaggtaatacaactattaagcaatgaacctgtgcagtctgactctaaagtctttgcatttaaccattgcatactagacagttggaagaaactgagactgactggttaagtaaaatttccaagatcacacctttggaaagcaaaggtggaatttcagccttgacctgtatgcccttagaatttgagttcttaattactattctgtgctacaagcatcattcatcttggtgaacatctagtttaaactccactttgagaggtaatattattcagtagagtgtacatagactttttgaactagaagagtctttttttaaattcaattatatacttgctattatagcttgcaatcttgagcaaataacttatttaagtctcagtttgcttatctataaaatttgggtagtcatacctgccaaattacattgtagagagaaataaatgatgtattgtgtctaacatagcattgagtatgtatgaggcaattgacatatggcgcaattactgtaattctggagaggaaactaaggtcaaaggaactgtgtcacatagctaatagtggaatacctgggatacaaatcaggttccctgattattatatttcttgccttgaactaaaaaagtactaagtagtgacaagattcacagaaaaataacctgccaatttctccatatgtctgttgttattccaactcagaatctgtgatattaatagccatagccaatttgctgaactcctagtgtgaaccatgctagttctctatgatatatgatgtcatggattgctgtgtaatatcatatgtatcactcttgctttcccaattagatcataacaatcatctcacagggatttgtttcttgtttgattgtttttgtgtttcttctgtatcctcgagcttcaccttcaagtgtgggagaaaaggtcttttatgttaacccacaaatcaactactttaactgcttcttaaatttttaaatattttattttatacttttaatcaatacatgctattgtaaatgtttatgggctacataatgatatttcaatacatataatgtgtattgatgagatcaggataatcagtatatccattatcctcctaacttatcattgctttgtgttaggaacatccaatattctccttctagctatttgaaactgtatattattgttgactatagtcatcctacagtgctatagaacactttgacttatttcccctatctagctataattttgtatcctttaaaaaatctgtgcatatacccttttccttacccttcctagcctctagtatcctctgttctatttttcacttctataagatcaacatttttagcttcctcatatgagtgagaacatgcagtttttaactttctgttcctgggttttttcactgaaactgctttgttgagagatcatttacatgcaataaacagtatcaactttaaatgtacaattctatgagtttcgacaaatgcatacagttgcataacaaccaccacaattatgacatagactactttgtccaaaatggctgccacttgtggctactgatcacttgaaatggggctagtcctaattaaatgcggtataagtaaaaaaaattatatatatatatatatatatatatatatatatactgcatttcaaaggcttagtataaaatttaaatatctcattaataatttatgttgattatatattgaccatatttttatatatcaagtaagtatatttaaattaatcttacttttttacttttaaatatagctagtaaaatattcaaattacatatgtgactggcactatatttctattgggcaatgttttcatagaacattgtgaccacttctaaaaacttattccttgccactttctaaacaatctccttcctgcacctgaactcttggtgatcactgatattccctctgtcactatagttttgccttttttagaacatcaaatagtgtgtagtttttcatatctggtcagcataatgcttctgagagtcatccatgtttttatgaatcagctgtttgttcctttattgttgagtggtatttatcatggatattccataatttatttatgtacttctcagctaatggacatttgggttgtttccagtttttgattcttaatgaagctggcatgaacatgtgagtacaagttttgtatggacatagtttttcatttctactggataaatatatcagaaggggattactggatggcataataagtatacgttcaactttagaagaaactgccaaactgttttccaaagtggttataatactttacatctccactagtaatgtatgggagtttaagttgttccacattttcaacagctttgtattgtcagtcttattaaattttagccattcaagtggatgtctttggtatcacattgtgatggttttcatttatgttttcctttataactaatgatgttgaagatatttgtatgtgtttatttgcctgccattcatatttcttccttggtgaaatgtgtcaatcaaatctgttgcccatttttaaatgttatttgtcttctaattgagttgaaagggtgaagttatttataaacactggatatgatagtttctatttttacatcttcaaatttacttttttttctgcagtgtttaatatcatggcaatacaatgcattgtaatttttcattgcagattttcttctctaaatttccagttggctcttggttatagcctatacttttttcttccattattttatattactctttctctctatcttcttgaacaaatgaaacatttgtagtacttttttaaaaagatccttgtctacaaattctattatatctgttatttttagtcttttaatttgtttatttctctattgtttattgtcctcgtttttctatctttttattaattattggactttttagataatacattgtttgctgctgggtttttttttttttgtattttttaaagtggtgatagattttgttctggcaccattgggatactttttgaatcagtttgatccttctgaagcttacttttaacctttattagaattggcccagagcaccaattagtctagggttactactatggtgataactatataatgattcttgcggatgctccatgtaaacacactgcttggtagaaacatgaattaagactaactctatgtaagctctgacagttgttcagagtcaggttctttcttcagcattgggtagtttcctctcacacaattgcatatcaatcttcagccagactcaaagggatgcctcagcagattctcagagctctatctcagtgcagctccttcatctctggtacttgttcttgcaattatagccatttggccttccataaactctgatctctaccttaactcagaacaaatgccagtctctgtctgggttccccatctctgcactgcagcctagcaactgctttcaggctgtacactggacgttcattgaactcaccctgcttctttaccttttctcaggaatcatgatccatcatttcatagattttctatttcattattccatcatggctggaagcataaggctagatattttaactttgaaataaaatatcatctctgaagcctgcaaaggttacatatgcagcctgagtttttcctttccattgacagttcaaaacatgggcactctgcatgggtcttcaagaggttagttttaaatttttgctccctaggttccaagtaaaacccagttagaaatattaacactttaacattcaagaaagaaagtctaaagactataatgggcgtacctgttgctaaatttgtaaggtttcatttctaaatcaaattagagcattaaaaagcaacttaattggagtacttttctttaactctcccacaaatggctttgctcagctatatttcattattgtgcttttagctttcactaaggccatacaaaaacatcacaccttctggtaacacatgcacacacaaatatagatacagtgagaattgaattaccgtaacacatctccatcacttcctactactaaatgtaattctcagatcctttgttcctggcttggtgaaaatcttgaaaatttttttaaacaatttcatttcattttaagttctgggatacatgtgcagcatgtgcaggtttgttacataggtaaacgtgtgctatggtggtttgctgcacctatcaactcatcacctaggtatggccccagtgtatgttgttcccccgcccccgtgtccatgggttctcatggttcagctccaacttataagtgagaacatgcggtgcttgattttctgttcctgtgttagtttgctgaggataatggcttccagctccatccatgttcctacaaaggacatgatctcattcttttgtatggctgcatagtactccatggtgtatatgtaccacattttctttatccaacctatcattgatgggtatttgggttgattccatgtatttgctattgtgaatagtgcttcagtgaacatatacatgcatgtattgaagtaatacattagtggatgccacttaatgtgtttttggtagttttgactcttatttcaacttcattgttctaattcctttttctttatgtcattttgatttttaatggaagaattacattttaaaacaatgagtgaataaaattgtttttctattttggcaatcctaaacacatagttgatattcagtaaactctgataaaatgaaagtaattgctaatagactaagctagtgaacatatgcaagaaattgattacaagtccatttatctcagtcccaagcacatattgacacctacaatatataaaatgttgaggtgggcgccaaaaaataaactgacagagatgtggtcttgtcatggagcaatcacttatgaatttgattttgtattgattcagtcagaacagattgctttctctgcttgaaatgctgccgcttcctgcaagacaccatactcagataatctctcatgtttcttacttaattcaagcccttcctttaacatcacttcatcaaagaagtcttccctggccatgtttcctaaaatacaattacctgtttatattttattctcttactctgtttgtgtctatatgtatatatacagacacatatatatgtacatttgagacagagtcttgctctgttgcccaggctgaagttctgtggtgggatctcggctcactgcagtctccccctcctgagttcaagcaattctccttcctcagcctcccaagtaactgtgactacaggtgcgcaccaccacgctgactagtttttgtatttttagtagagatggggtttcctcatgttggccaggctggtctcgagctcctgacctcaggtgatcagcccgccttggcctcctaaagtgctgggattacaggtgtgagccactgtgtccagcctgtgttcaaatttttctttcacttctaaccttaatttcaaagtaagatctgtgaggatagggatttgggctgatgtgttcaaacagtatccatgagtcttagaacaatgactagtacatgtaaatgcttaataaatattcacttaatcaataaatgaatttaaaaagtgaatcctctatgattaatctaatcatagatatgtttaagtttagcctgaattgtctgtagcttgccagaatttccactggtagccagctgtgtttgaactcatgaaaaatactttccagcttcactgttgttgtgaggagagtattctatgtgtggaggttaactgcacatccccaaagcaacattattgctgaataaagatgcctaatgcctttactattaattatctgtggctatgctaaactgtaagcttttgagtttttatctttgtattttaatagttaatttgaatagaacccagtaatttttttatttttattttttattatactttaagttctagggtacatgtgcacaacgtgcaggtttgttgcatatgtatacatgtgccatgttggtgtgttgtacccattaactcgtcatttacattaggcatatctcctaatgctatccctccatcctccccccaccccacaacaggccccagtgtgtgatgttccccttccagtgtccaagtgttgtcattgttcaatttccacctatgagtgagaacatgcggtgtttgattttttgtccctgcgatagtttgctgagaatgacggtttccagcttcatccatcttcctagaaaggacataaactcaaccttttttatggctgcatagtattccatggtgtatatgtgccacattttcttaatccagtctatcattgttggacatttgggttggtttcaagtctttgctattgtgaatagtgccacaataaacatacatgtgcatgtgtctttatagcagcatgatttataatcctttgggtatatgtccagtaacgggatggctgggtcaaatggtatttctagttctagatccttgaggcatcaccacactgtcttccacaatggttgaactagtttacagtcccacaaactgtgtaaaagcattcctatctctccacatcctctccagcacctgttgtttcctgactttttaatgatcgccattctaactggtgtgaaatggtatctcactgtagttttgatttgcatttctctgatggccagtgatgatgagcattttttcatgtgtctgttggctgcataaatgtcttcttttgagaagtgtctgttcatatcctttgcccactttttgatggggttgtttgtttttttcttgttaatttgtttgagttcttcgtagattctggatattagccctttgtcagatgagtagattgcaaaaattttctcccattctgtaggttgcctgttcactctgatggtagtttcttttgctgtgcagaagctctttagtttaattagatcccatttgtcaattttggcttttgttgccattgtttttggtgttttagtcatgaagtccttgcccatgcctatgtcctgaatggtattgcctaagttttcttctagagtttttatgcttttagttctaacatttaagtctttaatccatcttgaattaatttttgtataaggtgtaaggaagggatccagtttcagctttctacatatggctatccagttttcccagcaccatttattaaatagggaatcctttccccatttcttgtttttgtcatgtttgccaaagaccagttgtttgtagatgtgtggtactatttctgaggcctctattccgttccattggtctatatctctataatctaagatcttttagagttttttgggtttgtttttgtttttaagaagaagatttctgcatcatacaaatattctcctttaaatatggaatttcatcatcgtgttttcggggagaatggatgtgtatacctaaatattctttattttgaaatgtgatgaaaatgtaactagtaccagacagactgaattctgtaaatcagaatttattattctagcagcacatgggaaatattgaaattcattttgctgtaagtatagctggtgaagtgagcagtattgttggtttagagatgttgatgttttggaaagttgccattaaggccttttaatcttacattttggacttatgagaaaaatccccggggctattctaaaatcctaacagatgccttctgctaaaatgcgtacaaaatatatctctttttctatattagactttcatatttatttaatacaggaaacaaatatcttttgtattagaaaaaaacacaaatataagggatctgcaagatcctttagatctacttcttcaatttccagttgaaaagactgagactcactttcttgagtcagtacaggactttatcaatgacaggaaattaataacaggcagttctagaaagcagaaacctactattcaaattactaatatgccaaggtttcaaatagtttagttattgtgccttaaatattgttacaatagtattattttcccattacaggtatgtataccagagaataaaccacagtctacttctaaggaaattaattatataaaaggaaggatcctatggttctttatgaaaacagtatttttttataaaactgatcaattaaagctcattattagcactgaagtagaattactttttctccctaggagaactgagttgtaggaatgctttgtaaatgtgtttttaaattgttgattttatttagaattggcatcttttgctaaagaatcactatgagtcttcaccgaaaggttgaaatgagttgttgctattgttgagcattgtggggtaagagaaatcctgcctcacgcaaatttatttacattgcttcatccctctctgtatcttcaggaagttcaaggacctgcaataaaactgatgctgaatgtatttctccaaagagttggaactttacaatatttgtccttttcctttcttcagatttctttttcttatcctgcttcctattatatgtcttaatcttttgatatgaggccagcatatgtgccattgaaaatggtcttagagtttctcttttagtgaaattgaatattctcccatacatattaatagtgatatggtttagacaataatttagcatgataaagctctagaagcagccttggcttttctagtgaacatcatggcaatccttttaaacttattggtttagtatggtataaaactcacaggtaaaaaagaaagcaaataaatacaaatagataaataaggtatttccatagcattcagttggtgtgacaatcattatacacaaaaatttgctctagagatttccccctgtgcaatctgttggaacttcttgggcttccatgtggtctctgaatgaaattcacttttcattacaaaaatctttttatactgaatcatatgctccattactttctaggaaatgggaaatcattgcccactgtattgcacaaaaacataccaactacctacaaatgaaattaagatcgagaggcattatttttttattatttctttattttattattattatactttaagttttaggttacatgtgcacaatgtgcaggttagttacatatgtatacatgagccatgctggtgtgctgcacccattaactcgtcatttagcattaggtatatctcctaaagctatccctcctccctccccccaccctccaacagtccccagagtgtgatgttccccttcctgtgtccatgcgttctcgttgttcaattcccacctatgagtgagaatatatggtgtttggttttttgttcttgcgatagtttactgagaatgatgatttccaatttcatccatgtccctgcaaaggacatgaactcaaccttttttatggctgcatagtattccatggtgtatatgtgccacattttcttaatccagtctatcattgttggacatttgggttggttccaagtctttgctattgtgaatagtgccgcaataaacatacgtgtgcatgtgtctttatagcagcatgatttatagtcctttgggtatatacccagtaatgggatggctgggtcaaatggtatttctagttctagatccctgaggaatcgccacactgacttccacaatggttgaactagtttacagtcccaccaacagtgtaaaagtgttcctacttctccacatcctctccagcacctgttgtttcctgactttttaatgattgccattctaactggtgtgagatggtatctcattgtggttttgatttgcatttctctgatagccagtgatggtgagcattttttcatgtgttttttggctgcataaatgtcttcttttgagaagtgtctgttcatgtccttcgcccactttttgatggggttgtttgtttttttcttgtacatttgtttgagttcattgtagattctggatattagccctttgtcagatgagtaggttgcgaaaattttctcccattttgtaggttgcctgttcactctgatggtagtttcttttgctgtgcagaagctctttagtttaattagatcccatttgtcaattttggcttttgttgccattgcttttggtgttttagacatgaagtccttgcccatgcctgtgttctgaatggtaatgcctaggttttcttctaggatttttatggttttaggtctaacgtttatgtctttaatccatcttgaattaatttttgtataagatataaggaagggatccagtttcagctttctacatatggctagccagttttcccagcaccatttattaaatagggaatcctttccccatttcttgtttttgtcatgtttgtcaaagatcagatagttgtagatatgtggcatcatttctgagggctctgttctattccattgatctatatctctgttttggtaccagtaccatgctattttggttactgtagccttgtagtatagtttgaagtcaggtagcgtgatgcctccagctttgttcttttggcttaggattgacttggcgatgcgggctcttttttggttccatatgaactttaaagtagttttttccaattctgtggagaaagtcattggtaacttgatggggatggcattgaatctataaattaccttgggcagtatagccattttcatgatgctgattcttcctacccatgagcatggaatgttgttccatttgttggtatcctcttttatttccttgagcagtggtttgtagttctccttgaagaagtccttcacgtcccttgtaagttggattcctaggtattttattctcgttgaagcaattgtgaatgggagttcactcatgattggctctctgtttgtctgttattggtgtataagaatgcttgtgatttttgtacattgattttgtatcctgagactttgctgaagttgcttatcagcttaaggagattttgggctgagacaatggggttttctagatatagaatcatgtcatctgcaaacaggtacaatttgacttcctcttttcctaattgaataccctttatttccttctcctgcctaattgccctggccagcacttccaacactatgttgaataggagtggtgagagagggcatccctgtcttgtgccagttttcaaagggaatgcttccagtttgtgcccattcagtatgatattggctgtgggtttgtcatagatagctcttattattttgagatacatcccatcaatacctaatttattgagagtttttagcatgaagcattgttgaattttgtcaaaggccttttctgcatctattgagataatcgtggtttttgtctttggttctgtttatatgctggattacatttattgatttgtgtatattgaaccagccttgcatcccagggatgaagcccacttgatcatggtggataagctttttgatgtgctgctggatttggtttgccagtattttattgaggatttttgcatcaatgttcatcaaggatattggtctaaatttctcttttttagttgtgtctctgccaggctttggtatcaggatgatgctggcctcataaaatgagttagggaggattccctctttttctactgatttgaatagtttcagaaggaatcataccagttccaccttgtacctctggtagaattcggctgtgaatccatctggtcctggactctttttggttggtaagctattgattattgccacaatttcagagcctgttattggtgtattcagagattcaacttcttcctggtttggtcttgggagggcgtatgtgttgagaaatttatccatttcttctagattttctagtttatttgcatagaggtgtttgtagtattctctgatggtagtttgtatttctgtgggatcggtggtgatatcccctttatcattttttattgcatctatttgattcttctctcttttcttctttattagtcttgctagcattctgtcaattttgttgatcctttcaaaaaaccagctccgggattcattaattttttgaagggttttttgtgtctctatttccttcagttctgctctgattttagttatttcttgccttctgctagctttgaatgtgtttgctcttgcttttctagttcttttaattgtgatgttagggtgtcaattttggatctttcctgctttctcttgtgggcatttagtgctataaattttcctctacacacggctttgaatgtgtcccagagattctggtatgttgtgtctttgttctcgttggtttcaaagaacatctgtatttctgccttcattttgttatgtacccagtagtcattcaggagcagtttgttcagtttccatgtagttgagcggttttgagtgagtttcttaatcctgaattctagtctgattgcactgtggtctgagagacagtttgttataatttctgatctttcattcattattttcagtgcacacctgaattgagaaaagcacattaatgaacttgggttgttgatgtcaacccattttcctgtatttattaaaaattatcatgtattctgagcttaaaaattgttttgatttcttcacttaaaaaaggttttcagctgttcacataatttaggaaacagcaaaacaaaacaaacaaaaaaaaaaacctgccttcccatgagactttcatggtaagtccacctggatgaccaaaaatactttttatttgttagcattcttgctgcagaaataacatattgttatgcagatatattcacttcaaggcaaaacaccaaattattttctagtgtttttccctttaggagctttcatgattctaaacctttcatgagatagataaagtaagtctttctgaagattggatactgtaaaatccaaaactattctaagccaccaggtgaatatgatcaatctgagttgtgtaagcctcaactcaagacaataaaagctgtttgtagccttattgatgccaagtatatgtcaatataaaacaacagcaacaacaaatctcaaaacattgtgatgaaattagacttaagatatttaatttggatttttaaaaaaagatacacatttatttttttaaataattaaattgataaaaattatacatatttatggtacacagcatgatgttttgatatatgtatccattacctcacatacttatttctttgtagtgagaatatttaaagtctactctcttagcaattttcaagtacacaatacattgttattaaagagtcatcaggctgtgcaatagatctcctgaagttatacctcctgtttaactgaaattttgtaagcctttcaccagggtcttcccaatccctgtcacctgcccaccccagtccctggtagccatcattatactttctgcttctttgagtttgatttcttttttttagattcatccacttggattaaaaactaaaacataagacctgagactgtgaaactactagaagaaaacataggggaaaagcttcttgataatgggcaaagattttctggatatgatccaaaaagcacaggaaacaaatgcaaaattagacaaatgctattgcatcacactaaaaagcttctgcacagcaaaggaaacaatcaacagagtgaagagacaacctatggaatgggagaaaatatttgcaaaccacacatctaataagggataatatccaaaatacataaggaactgaaacaactcaatagcaagaaaacaatccaattttttaaatgggcaaaggacttgaaaagacatacgaatggccaacaggttcatgaaaaatgttcaatgtcactactaatcatcagggaaaggcacgttcatttcagtatcttttattaatgacattatggtatctatatatatctgttagtattgatttttaattatagcatccaaaatattcagtttctgcttacaaagctgttttaagttattttgattcaactgactcatcaaatcaaacaaatgatttgatatcattttccaatgaaattaaatttcttaatttctgtttttgactgaatgcagataaaactcttggtcatacagaaagtctgttcccacaccattgccctcattccattatatgcattttctactcaatgtcttcactgtagtattgatggtggatggagagataaagtctgcattaactgaaacaagttatttgaatatcccttgctaatcagtaaggtaattaatgcattgtaactaggatgtagagcctgtgaaaccctgttgtataatgccatggtacagacatatctaaaatagaccaacagatgttttgagaaacttcttaaaattttctttgcttctttggagtttctttaccaaattataagtaagaatacaaatgtagttggtgatgatgagataattctttgagcaaaacaatagagctgtagatgaggttaaaaagttcatattaatattgtcaagaattttttcatatagaagtaattttatttttcagatttttgaaagctggagagatgaggatgggggaatgaaggagcagtaaggtttgcccaattgatgacacatttatgtataattttttcatgctttggaaaacaatttaaaaaaaaattgttccaagaagttttaagcacattatagatatgaattaactgcatagtattagtttaaaaattattagagcatttgttaatttcatatatgacagcattagataatactaagttctaatcttttgatttttctagctcatagccctattctgggtctccttttcaagttttttaatatattcataatttaatacattaccttttaaatattattttattttagatttaggggatacatgtatatgtttgttacatggatatattgagtattggtagtgattggacttctaatgtacccatcacccaaatagtgaacattgtgctcaataggttatttttcaaccctcacccttttcctctcattagtaatttttttgcagtaggtatttttgttaggctatcagacgttgaattagtggaactcttcttaaaatgacccataggtgactcagttcatttctgtgcagtactcttaaaatagagatttttctgactttctagttgagaaagatcatgtaattaattgtcaaaacttttaaatcaaaatgctagccttaatataaatttccaacactgcagtggagtcagggtaccatataaacctgattactgtggcaaaaagcttgaagctttcataaatgcagaacaatgctggtaaagaggaacctgattttaaaattattgcttaaacctaggttttcaataaagagcggaaattgatgagcgtttgagggaataataaccaatggttacagtcaaaatggtaacttctgtgacatttctaagtatgcaagtgtgagatggaagtatttggagggactgagagctcttcactacctctaatttaggcagctttcactagattgggagagttccaatatatatacctagttgcaggtgtccatccttgaagaaagtgaaaaaggtcaatgaatgaacagattccacaagtcttgtctgctactaaaccaactggtcagtgttgttgtggaaataatgtgtgaaaagcatagagcacaggtcctggcacatagtaaataccaaatacatggtggatattactaaaggaggtagcaatgcttattagctaaaagcatagattctgaaatttaaccatctgtgtttttgtcttgcttccacaataacagctgggtaaacttgggaatgttatttaacttctctgaggcttgtgagataaaaatagtactacctcatatggttgtcaaggaaataaacgagaatatatataatgcgattaaaccaactcctagtatgtagtaagcactcaatgtaaatatcagttatttctactacaactgcaactatgatgagggtgatgactatgactgctatcaccactgccttctgcaactactgctgtctggcctatcttattaggaattggctgggagcttgtagaaaagctttggaaaagcagaattggataagtcaggacctgactaatctgaccaatttgggcagagctgaagcttactttgtaacgccctggaagcaaatatggaaaaacagattatcatgaggattaaactatctgataaaacaaaacacttttagcaagattatcaaattatttataagtaaatcatgaaatggtgctattttaatcacagatttaaggcacaccaaattcttaccccacatgaaaagacctgaaccccaagatttaagaaaaaacttatatacactttaaaataattttctaacagttattttgtgtgctgcaaaagaactgacatattttcttattgtgtaaaatatatataacaaaatttattgctttaaacatttttaaagagtttggtgacattaagtacattaacactgttgggcacccatcatgaccatccatctccagaatattttcatttttccaaactgaaactctttacccattaaacaataattccacatttccagctgccttaagttcctggcaaccaccattctacgttttgtctctacacacttggctattctagacactgaatataagtagactcatagaatattgtccttttgtgtttggcttatttcccttggcatagtatcttcaagcttcatctatgttgtagcatgcattagaattttattgttttttaaggccaaatagtatatttcattgtatgtatatgccacattttgtttaatccattcatccgttggtaaacatttgagaagaaaggcactgtcctcaacttgatttcagctttctcactggccatggatctatcagtgatacgttctataagatccatctattttggcctgatttgtagttgattaggagtcatacttctttagattaggtatttttgtcttgtctggttatggtttcttaccaaaaataaacaatgccagggttcactataatcattgtttcttaataatgaagcaactaaatggtaccaggttctttggcaagactaaatgttttatattggaaacccacaatttatgaatctaaatgaatctggagctctgacattttagaacctttgcattttgttcaaggatgaagatgaacaaaattaccaaagagcaatgtatataaaaagttgattaatttatatacattgagtacttgttacaggcaaagaatctcccgaggtgctgggaggattataaaaaaactgtaactaactgagtcaggcttatgaccttacattaatttttggagaacaggaagacatccctgaaaaataaaagtactaataaaaaggtaaattttttttctaactcttccaaatttaatgttcttgtattgcttgcttttgtacttttcatttagatcatttattacaatttataatttatatatttggagaaattattgattgaatgtctgcctcaccccagactataatgaggacagaattgaggtcacgtctctaccagtgtgactaggaacattggtaaatgaccattgaattaattagttaagtaaccacatgagcacaaatataaaatttaagtcatgggtcagtagccgaaagaagataaggaaagatttactgattgtctacaatgagccagctgctttacaaaggtacagatgacaattacaggctaggcagtgagaacatatctaactctgcaggaccctctgccattgatgctgcctgactgttacacagattgagtctctctttatctcccttgtcacttgtgttttcctgtgtcacctgtgttttccttctgtgcctctatcattattgcctcaacaccttatcatatttaataattttaaattgtttttcagtttaccaatggcttcatgtccatccatcagcaaatcatcatagcaactctccactttacaaaggaggaaacagactcagagaaatgtgatgactatcccaagataccacaaaagtaaatacagaacaaaacttaaaactgggtcttccacttccaaagctagtgctgccccaagcgatgggattatattgcactttgtagtgactgtgacagcttttaaagtgaccaagtttctttttggttccttttctctcttggtgtagagtttttgagacacaattgcatttagaattctcaagtactgaaaggtgcttttccccatggatttgaatcaagtgtgcgaattgcatccaaaaaggttaatctgtttacccaactagaacattttgcactgcagaaataaaactagaagttgcattgctgggctgctccagatgtcctgtgctttgagctgctttatttgcatttggtatttcaaagcttgtgatcaatttacaattataattgtcaccaaaattttactttaactagcactttgggaaggaaaacatcaatttacattattttgcagagtttgaaaatatctaatgatttataaaacaaaaatgggtttcatcaagacaagtgagtacaaaattgctgttgctgatctatgttgtaatcatttcctaatacaagatcttgttattttcatacatgcattttgtattcactatgctagtccataataagataattttaatcactgagttatacagctgctctaagagagtgaagagcataaacatgaataagaaaatcagacagctgattataaaaatgtattattggatatctgtcttggcggcacatgtaactagattaacagtgagcatgattccatatgtaaggtgtttcttacttttcatatctcctttaagatatgcaaagatatatttactttatatactatcaatagaattcttgtcagtggagttagaggaattcctagaaatagctcagtttctttaaactataatactaccagaaagaaaagacgtcataaattatgtatcaaatatattgttttgagagtcaatagataatagcaaacatttattaagtgcttaccttaagctaggctctgtgctaagaacattatgtgcataaggtcatttaatcatttgagagtaagcacttctactattacgaattgctatggcctgaatgttcgtgtctccctaaaattcacatgttgaaaacctaattaccagtgtgatggtattaaggggtgaggcctttgggaagttattagatcatgagggcagagctctcataaatgggattcatgtccttataaaagaggcccgagagagttgccatggcccttccacgatgtgaggacacaacaaggaggcgctgtctatgaaccagaaagcaggccctcaccagaaaccaaattagccagcaccttgatctcggacttcacaacctccagaaccctgagaaatgaatttctactgtttatgagctactcagatgatagtattttgtcatagttacctgaacagactaagacatgaattctatctcaaagatgaggaaactaaagttgaaagtggttaagtttctgaaggttctgcagccagcaagagatatataaagtaccaaataataaaataaattttcaaataaaagtcaaatccaagaaaaggcagaaaatactaattcttagttcagaattttattattagtctgaaaaaataacgtaacttatatgcaaattatacaagcttagaataaaaagaaaccccttaaagactctctgaaaacacagactatgtcttacttattttttcatctccttgcatacagtagcccacaatttttttttttttttttttttgagacggagtctggctgtgacacccaggctggagtgcaatggcacaatctcggctcactgcaacctctgcttcctgggttcaagcgattctcctgcctcagcctcccgggtagctgggactacaggcacacatcaccacacctggctgatttttgtacttttagtagagacaagagatcaccatagtggccaggccggtctcgaactcctgacctcaagtgatccacctgcctcagcctcctaaagtactgggattacaggggtgagccaccacacccagtcatataaaaaatatggagttgaattttatccagtgtcagaaccttccaaaattggggagtttacaatccaatttattcttgagaagttccaggtatcaaaaaattcttttatcttttaagtaataatgtttctctccataatttccctttgttgaaattgtgtgatcatggagcctaaatgaccattggtaatataatattaatattcaaaatggatgatgcaattcatactgacctgtcagcagcccaatattaatttaaactactgacctacattaatttacctcagagcaatggttctcttttcttgcttactttcgggtcaacttcaaacacaccaatgccccgttttcacgacagataaattggtctgcatatctggagttgatctgaacataagcattttttaacaactccccagatagttctaatgtgcagccaatattgagactcactatgatagagaaatgcacactaaatacagagggttgttgccaagcaaggaactacctggctgcccagccaagacaatccagaatagcattatttttatgaattcatcaagcatttgggtccagaatttgatcttaaccttgcataaaagttaatcagaccctaggaaattgataatatgttaatcaaacatgaaattgtctcatatagaatatagaatgccagactatgggggcgtcccagtaggcacattcgctgtctgaaaacttgttcctctttttcaattagttgtgtggacaaatttctcagatcattgcactgaagagctagaatctgagtggaaatagttgatagtgttggtatattttgctgaagatgtgaagaatcttgataaaatggccttgttttgatgataatgctcttttgtttaaattctgatgtcctatagattcaaggtcctctggatattctaaattaatattgccaagttaacttatttgactcctgtttttctatgactttgtacgtaatcctccttctttctttatatataatactttatcttacagttttagcattggcaacattctatttcttttatatttcttgattgtattagtgaaattctagcactccttaagcatggtttacagaatgcttatccaatgtgtggaagacagaaaccttagagggttagaacaaacattagaagagcagttcgttcttaacctacttttctgctgagatgctcattaaagttgatgttcacttgcatgggcatgcccggattttgaaaaccttgtcaaattatctctatttctgggttttttttttatctgggtctctctcatgttttaggctttcctcaaatgtctgatgattcttgattgtctgtttatatttaggaaagggtccattaaaaagctggtttggacctctgtgttcaagggtagtcctagctttagcataatgagacagagaaagcagacagggcattcaactaggtactttgtgctgggctcccttcctccccccaactcccaccacacacatcctggaaggcagcaatgcttctgtttcatcatacagcatagtcacatcctttagaattcttccaatttttttgcctcaagattggactgagggtgtcaacatccggaggtcagtataaagacccccccagcccaccaccccatgcaagatcttgctctgtcacctatgctggagtggcagttgcacaatcacagctcactgcagcctcaaccttcttggctcaagctatcctcccacctcagcctactgagtacctgggattacaggcatgtgccaccacacccggctgatctttgtatttttttgtagagatggggttttgccatgttgcccaggctggtctccagctcctgggctcaagcaatcctccatcctcggcctcccaaattgctaggattacgtgggtgagccaccgcacctggcatatataaagacttctagacaagggttcattctggttcccttttcagctacagccccaggatgtcacctggctgagtccatctctgcccgccctcattatttgccacccctccaatccagctttggtcttccaaagtgccggtgactgccccataccctctcttgatcattgtgtattgattgctttctcaaaaattccattttttattttttaaatatctaatgaggagaaggagacaattacctgtggataaaagaaaaacagacattcaggaaaattattgaatgtggactgcagcataggtaagtaggttgtagattattcacaattccattggctcaagctatattccatcactttgttttctcaagaaaagtcttactagttgccagaaaaaaaaagttgatgatcttacagagattttcttaaatcgaattcatgggccaagatacttgagtgttaccgagaaattacttcccaccctcttcacaactgtttataagtgaacactctgttgtgtcactgatttaaaagtgtcattaaaagaattgggagtccagaagaccttcacaagccataattatagaaattatctgggaaggtaacttttaatactggtggatataatattatgcttgagtgcagttggaagagatgtggtagaaacagacacagattttacctaggttttttttttctaagtttccagggccacagttatttctaaagtatttttgtatgttcctcataatacccagcatatagctttatccatagtgagtactcaatttttcattgataaagtgaggtagtttctgggatcctggcagtccacggacttataaaatattagagctgagtggaatttatcagcccatctgagttttctttggttctggtacatttttcttttctatatgtcattattacttaaaaagaggatgcatatgaaaatggatatgtacagataagatgtgattgcttctttttcttaaaaaaccaaaccctaaggaatcgccacactgacttccacaatggttgaactagtttacagtcccaccaacagtgtaaaagtgttcctatttctccacatcctctctagcacctgtggtttcctgactttttaatgatcaccattctaattggtgtgagatggtatctcattgtgattttgatttgcatttctctgatggccagtgatgatgagcattttttcatgtgtcttttggctgcataaatgtcttattttgagaagtgtctgttcatatccttcacccacttgttgatggggttgtttgtttttttcttgtaatctagaactagaaataccatttgacccagccatcccattactgggtatatgcccaaaggattataaatcatgctgttataaagacacacgcacacatatgtttattgcggcactattcacaatagcaaagacttggaaccaacccaaatgtccaacaatgatagactgaattaagaaaatgtggcacatatacaccatggaatactatgcagccataaaaaaggatgagttcatgtcctttgtagggacatggataaagctggaaaccatcattctcagcaaactattgcaaggacaaaaaaccaaacaccgcatgttctcactcataggtgggaattgaacaatgagaacacttggacacaggaaggggaacatcacacagcctgttgtggggtggggggaagggggagggatagcattaggagatatacctaatgtaaatgatgagttaatgggtgcagcacaccaacatggtacatgtatacatatgtaacaaacctgcatgttgtgcacatgtaccctaaaacttaaaatataattaaaaaaaaaccaaaccctattatttcattgacagattgtcttagagttgatagcatttaataattgagtaagtacagtccttccttgttcctaacgtgccctattttttctttcttctctacttttgcatatgcattttccctctttcttgtttcttggtgaattcctaaaccttttttttcaaaatcacctcaaatgttaccgctttgaagaagccttcctggattctcacaggaacagctaatgtcatctcttttaacatatccccttcttcatctctatgtatactgttcttcaatttcattttataagtagcaaaattcatccagagagatgaaggagcatttacaaggttaaacatcagaagagccttagagatccagaggaatctatttcagatccatgtaatctccatgtggccagctgggccatgtggcctagtctcgattttggttgaatttcaaaggtgttttatgaagaaataggggagtaaagaggtcagaagttcattttgagagatgctttcggaagacctctttaccacgtaatttgtgtattcggtggtgtgttttccactgtgattttggccagggtgcagctgtactgagacattcgttacattgagtcttgtagaatcaggtagggcctgaccttttaagaccattattatggagtagaacacagagaagctgcctctgcagctggcaacatgtatgggtaatggagcgtatcttcagactgtagagagaaaagaagtgcgtgtattcacttcccaggagaaataatattgtctagcattctctataaaccaaaatacaaaagcagtcctgtgttataggactctgcccataactgatgttattgccacaattcccagttctgttttctgggcacaagcttctgctgggatttccaattagcagagggagctctgcaagagttttggattgtggacattgtcactgttctgggttaaattgtgtttcccccaaaagatgttgaagtcctaactcccagtgaatgttaccttattcagaaataagggtctttgcagataatcaagttaagatgaagtaattagagtgggccctaatctaatatgactggtatcttttaaaaaagagagaatttggaccttgggacagatatactcagagggaagacaacatgaagacacaatgagaatgccatctacaagccatggaatctctgaggtgaggctaccagaagcttagagagaggcatggaacaaagattttcccatatatccctcagaggggatgaatcctgctgacaccttgatttcagacttctaacctccacaactgtgagacaatatatttatgttgtttaagctactcagtttgtagtacttttttacaacagccttcggaaacgaatacagtcactaatttgctttcatctctgtgtcacctctccaaatgtcagctccttgtttccaaaatgagggaactagataacatgatctccagctctaaacttccctgatctttctagaagtttgataagctggttctgcagctgtgcctctcttcccacttcgtctttgattccttgacctagacccttggtttggatggggtatgcctaggagtagctcacccttctctgatctcctgggggaatttaattgaagtacattctcctcctgcccagtagtgatgtcaagaattagaggaaagacgtgctgtgtctcatacatcatggatctctgactccttctttccatcatatctcctgaaagtttcaggccagatattttacattagagatcacaacttggactcagtacacaaatgggttttatttgcctgtaccattttttaattttttaattaaaaaaattatttgccaggatgaaaattctaaggtttcacatcaaaatctgaatttctgacatagcaggccaggattcccacacaataacaatgactatttccagctcagttctgttgaaaggtggttgcctttgaaaaagtctgcactctctattttgcactgcctctacccctctctatttttccttcaccagctccaattctggcttctctcatgaatgctatctccatgggtcccacaggcatttgagtttgggacctctgtggacattatgatgagaactatttatttccctactattttatctgggagtacagaatttaagtcattttatatgtctcacatgttatatcagagtacattatatatctacaaatgtatatgccctttaatgattatgcatgtgtccccatagtgtcatgtacattgtggacactaaacaggtatgtattttaaatgtttttgtccactctctaaaaaccaatcttttggtaccatgaggtccttaaggatagaccagaaaatagtgctgcctcagggggttactatcctctctgaggaagtaagatatggagtcaggcaggtaaaggatcaagaagaaagtgaaaagtgcgaagacaaatgcaggcatagcatgaggataattcaggggaaggaatgagcacttctgagtggggccatcaggaattttgcagtggtaatgggggacattttagctgagacttggaaaaatggtagaatttgctccaacatgaggaaatatgagcattgagtaggcaggtatgggggcaattttgaaaacaaatagttcagtttgactgaactaagggaaatcgtgggaaatgagccagaggggataatttagaactatctaaccatggcatcaacatcaggtgtaaggagtttagacagcactgagttattaagctcctggaggagctatatttattctttgtccgtgagtaagaactagacaagaaagatgtgccttgcctctgttgttccaaaaggaaaatggccatttatgtttgcatctactctgagtttcgaggtagaaaatcttcctttttaattttcttcattcttgtatgagtagcaatttttagggaaagcagccgaatacagttcttggcagtatgttctaaaatagcaacacagcatccttatctctgctataacttcgtatcctccagctttctaacaggagcatattggcatctttcacagaattatgctcaacaacttattagctgttcattgagaaaacttatttgtcattttgaaacttgagtcaggtaaaacattttctttcacattttttctttctccttttcaccctctcaactttctctacttctttctgtctcatatctctcattgtctccttccgtccctgtctttcttccttcctcctttttcttcctttcctccttctgtccttcctttctcctttctccctcactgcttccttctcatctttataataaagcagttaagagcaacaactttgaagtcacatggccgaggctataatcctaggctactgactgattgtagaaccctgaaatagctacttagcttctttgagcgtccatttttccatctgcaaaatgggatcatgataataactactgcataagaatattgagaatattcatgtgttaacacatgcaaaacactcagaccatgtgccagggacatgttaagtgctcagtaagtgttgtctatttttattgttattatatctgctgatttttttcacatttatcctcactgagtttgggttcttttaaaattgtgtagaaaaatacattataattgttctttgtttaattttagacccaagagatatattttgatattaaaaagattttttgttattgtggaataacatatagaatccacaacctagatccatataatttgttaaatgtattattggactatgactgattaagtgggttaattttatacatgtaaccgtaagatcacttttagaagactatggccatattgtagatgccttcttctatttgctgattgagatagaggaacatgacatattttatgtataaggagtcagaggatcttgagtttctttaggatttttttctttctcttcttttctttttttttttttttttttgagacagagttttcctcctgttgcccaggctggagtacagtggtgagatcttggctcactgcaacctctgcttcccggattcaagtgattctcttgcctcagcctcccaagtagctgggattacaggtgcctgccaccacgcctggctaatttttgtatttttagtagagatggggtttcaccgcattggccaggctcgtcttgaactcctgacctcaggggatctgtctgcctcagcctcccaaagtgctgggattacagatgtgagccaccatgcctggccaggattttttttcaagagctctatattttgaccatttatctgtttctcttttctttttcctttattgggtgcttccagtctatcatattttgacatttgaaaagatcagtatttttccacacgctagtaagcatattttacttgaaataggtaggcccatgaaattttgattcctttttttgaagacaatgattttaacaagagaaaatggcttgctttatgtcttttctaataactgagttcaacgtgtatgataagtgagattctaacagttttggcaaaagtgcacaaatgtaactttcttgacagcattttgaatgttatccctccacagtagcttttatgtctgtccaacttgctttctaagacacttactttcatcggcactttcagatttttgaattatactttctcaatttgatttttcaagtgagttattaggatataggtgggagtggagaatgcctgcctgcctttcttcctttgtcattccctctctcctttctccctcctcccctccctccttttctccctctctccctccctccttccctccctctcttattcttttatttgtcttttttttttaaaggctttaatgttattctgcttctgttaagctggcaaatattgcccttaaataatcatcacagacactttcacccttcttaccctcaattcatcaaataaaaacaaattaattatggttagatgcatctactaaattgtgagtgcctttaggccaagagcagatgcttttcaaaatacgtagaagaatgaatttactcacagtacttgtgatcattaaatcccttagcctaccagtggcttttttacttgacttgtacactgggttaaaggctcttgctctccctgtctacttccataggttatcatatgacaataatgataataacaatacataacttttgttcagctcatgaaagtttttaaaatgttcccatatacaaagtgattaatgagaaagctctttagaaatacaaaaagcaaagcaaatgcaaggtattgttttcattagcaagtttaaagaaaacttctgcactgaaatgtctgtgtggtgccattaagcatttaattttatttctcaggttatggatttgtctcatgagaggcgatgtgcttaagaacatcagtttgagtgaagcaggactggcataatgcataaatgtacttccagggaagtcgggaagacaccaaaaaatgtgcttactgttgccatagcttgaaatggaaaatgatcattttcctttgttagttctgaagagctagcagattgacagtaatacgaaacaggatctaattttacactgatgcaaattagataaaatataaaaattctggttctagaaagaacacaagtacttgcttataaattattcaattggacactttgaaaagagtctgcagtgctcctatttcggcaacatccaagtagatgttagaatgacggaatgtgttatttttgaaagtgactttatggatcatctaatcagttgatttgatggggaaactgaaacacataaaggcaaaatacttttgctatgaccatgtgactttttaatggctgaactagactctttcaatatatcatcccccatattttgcctataatatttcaaattctcactagatagagctcactgaaggtaggtacagcaggtcctctagtaatgcagttttgttcaatgttgtttcctcataacatcaatgaggggaaaaaaaaagttaattcctggctcaagccactgtctgggtgcaatttacgttctccttgtgtttgcgtgggttttctcccagtactccagtttcctcccacatcccaaagatatgctccttaagtgaattggcttctgtaagtggtcctagcctgaacgagctgtgtgtgtgtatgcgtgtgtgtgtgtgtgtgtgtgtgtgccctgcgatggaatggcagcctgtccagggctggttctcaccttgcaccctgagctgccaggatagactctggtcatctgtgtgcttgaagtggcataattaccttactatttttttttttttgagacggagtctcaatctagtccatactgatatttctttcctatatctctaaatgcttggactagtcattttgcaattcatgatggcccatactattccttttttttttttttttgagatggagtctcactctgtcgccaaggctggaatgcagtggcgtgatcctggctcactgaaacttctgtctcctaggttcaagcgattctcctgcctcagcctcccgagtagatgggattacaagtgccagccaccatgcccagctagtttttgtatttttagtagagatggggtttcaccatgttggtcaggctggtctcaaacacctgacatcatgatccacctgtctcggccttccaaagtgctgggattacaggcgtgagccaccacgccctgccccttacttgttttaattactttttctgaaatgtatgtatatatagttcacatttatttcaatgcttaatatgagaagtgttttgggctttatttagaaatttggtgatgttttggacactgtaggaacttcactcttgtttacatcaattagcctatggtaaaattggtttccttatctgggatttcgcttaaagttgcagtttccaagaacctattgatgacattaagtgaggacttactgtagtcatgaatccattaattcatccattcacccattcatccacccatcagtcaaaaatttgttgaacattaattttaagccacatatattaacattgtgcttttgtgttgttttgtttttgagatggagtttcgctcttgttgcccaggctggagtgcaatggcgtgttctcgactcactgcaacttctgcttcccaggttcaagcgattctcctgcttcagcctcctgagtagctgaaattacaggcatgcaccaccacactaggttaattttgtatttttagtggagatggggtttcaccatgttggccaggctggtctcgaactcctgacctcaggtgatccacccacctcggcctcccaaagtgttgggattacaggcgtgagccactgcgcccacccaacattgtattgttaagtgataaaagttcagggataaataagatgaggtggctgatctcaaggagcttatagtcttagtcactaagggacaataaaaaggagtgaattaattactctgcagagtaagtcagagaaatattttgaaaagagatatttgagttggaacatgaacacaaaggtcagttcctaactaacaaaataatcaagatgataactttctactaagcttctgatattactaatatgaaatacaaataaattatttcagaggtagaagctttcactatagtatttactctatgtacccccctacacatttttaaactttaaacttcttggtccatgatgccattaactcatcccagccctgccttattaagatgaaagctttgacctaaaatatatatgtttcagaaaacctagaacaaaaagtaaaatgataatttattttcaaaccaaaccaacaaacagaactgtccttaaagcttctccttttagaagagtttcagttaataaataaatgtagaaggaattagagaaatacaaagttgccattagaacccaggagtaataatagttgcaggcaagatccaccagtgaatgataaaattattggtgaaagtttgagaaatgacagatatgtctatagtgataaagtgtttatttcaagatatttttaattacaaaagcaaaaatactaattttgtaatggagacaccaagcagattccaccttaacaaggtgatacatttaatatcaacagtaagaagacaggtgggcatcagcttttacctcacaggatatacttcaagcgtgcatcacttacaaggacattctgcaaaatgactaatctgttctctttaaaaatatcaagatcacgaaagacaaagaaagaggggggaactattatagactgaagataaataaggcaattaaaaaactaaatggaatatgagatactggattggatcatggaatagacaaaagccattagtggaaaaactggcaaaataccagtaaagacagtagtttagttaatagtattgtactatgacaattccttagtttttaagattgtactatgaatatgttctaggaatacatctcgcatgaaggtatggctctgcataccttaggggaaacaataggggagctggctgaaggatgaatggtacacagcaactctctactctttctgtagcttttttgtaagtttaaactattttcaaaataaaaatgatgtaaataattgtctttacacgttagggatacttctaactgatttgaacttttaataaagggtatataatgttgaaagctgatccaaatcattgtgttaaaggaaatttgaaacaaagggaaaaagatggttgtatttctgtaacatctttattctagtactaaagtatagaatttaaataaaatatatgatttagttatagattagtcttaactaatatcagaattagtcttaacctgtcttgtgccccacctctgtttacattaccctaaaaatagtatataacacaaaacagaaagcatgcgatttctcaagtatattcaggaggttgattctggggtgtaaaaaggtgtagggctatacggcccgtcattagcaaagaaaacaattttcttttaatttagaaaacatttttttatccccaggagatattattggctcaagattactggcatcatagtgttgactttttcattatgaactttctaatagctaatatttttattactccaattatgtctttctcagtttcttctttatggctgagaagattattttagtcagcttgtgactttgattgggggattttctaagctaaagtgtaagagttcttaggtaattctatttcagtgtttagaatgctagatgtctatactttaaatcatgtaaatgtttatatgtttgacctcaactgatgtaagtgggttttattgagcattatttctaataataccatgtgtttgaaaatcccactattttaacataggtagattctgggtttaattactaaatttttttcaaattctgtgcaatcaaggtgaaagggtttgtttccaaggaaacaaatgcattccatttttatcacataaaatgttttctgcaagaaaattccataaccagtctccagggagataccgtgtcataaaatagctctccttggagatttttccaaaggaacactttattttatttttgttccctgaaaataatactgtatttgtgtaattttcattgtattgaatttttaaaaaattaacaacagagttgttgccatcgtctcattagagtcataaaatgtacaatttggggagaatgtgattttcctctgaccattaggttgcatttatatcggagtctaaatagcatgtattcaagatgttcacttgagaagaaacagcctgttctaatgatgatatttgtcaccttgaaggcttcattctttattggtatttatttgatgttggacataacttcttcttcttaagaaaatttgacagccacataatagtctggctttgcatatctattagtccattttcacactgctgataaagacatacccgagactgggtaatttataaagaaaaagaggtttaatggactcacagttccacatggctagggaggtctcacaatcatggcagaaggtgaaaggtacgtcttatgtggcagcaggcaagagtgaaaatgagagcaaagtgaaagggaaaaccccttataaaaccatcaaatctcatgagacttattcactaccatgagaacagtatgagggaaaccaccttcatgattcaattatttccgacttcctcccacaacacatgggaattatgggagctacaatcaagatgagatttggttggggacacagccgaaccatatcagcaaactattatgattgaattaagaaataaggaaactgagggaagtagatttgctttacacaaatctgagggattcttcttatgtacttctttttgtagtagttggccttgcccatgtgagtgtttgcatctagagacgttgtgttattcctcttgtagcttggacctaacatattaagtgctacaaaatgtttgacaatagaataaaataataaaacatttatacattaagaagacacatttttgaaatagaaaacaagataacagtgaaattacagtgggtggggatagcataatagtcaaaattagaagtcatagctctgccccttacgaagtctgtaacttagcatatcatttaaacctctctgtggccgggcgcggtggctcacgcctgtaatcccagcactttgggaggccgaggcgggcggatcacgaggtcaggagatcgagaccatcccggctaaaacggtgaaaccccgtctctactaaaaatacaaaaaaaaattagccgggcgtagtggcgggcgcctgtagtcccagctacttgggaggctgaggcaggagaatggcgtgaacccgggaggcggagcttgcagtgagccgagatcccgccactgcactccagcctgggcgacagagcgagactccgtctcaaaaaaaaaaaaacaaaaaaacaaaaaaacaaaaaaacaaaaaaaaaaacctctctgtaaaatggggaaagacatatctatttcataaggttgtatattaagataatatgtgtaaaaagtgtgtgtgctagaggaatttctttaaaatatgggaactattccataaaaagcactgtgatgctacacataatatgactttgtcttaattcaggagatgtattacatttttcttgtttttaatgcaaattccatgcatgggccagctaatgtgaaataatttaattaccttgctaggttaacactatcatctaaaaaacagaagttatttttaaaacattctgtgagagtttggacttctctcagcctaaccctaattctacaaatccccaaaattccaactgcagagatccaacatgcagctatctaactcatcccacatggctcaaatctttacatgacttagaagtatagattatcaatcaaagcaaatgggagaatggattgatttgtgaaatggcaacaggtccctcatgggagaccaagtggagcctccttaaaaagtttagcttgggcaatttgtgaacaaaagggagacactcatgactcatgacagacagtagcgtacaggaaacagtaaatactgacaacaaaatgtggcatttgtaaaacgttcattcatttattctttcattcattcattcatgtgacaattgtttatttagtggtgagtgccagggactaggctaaatgctgtccacatacatgatctcatttgaaatcacatgaaatttgggaaaatatgatcaatcccatgtagtggatgctgagggacacctcacagacccccacttaaggaccgaactacactcactctcccagctgtccccaaatgttggcagtcaaagcctcttatatgattctctatcaagatatgtgctctcaaccaaagatagacacctcacccagaatcatggtccttcctgggggcagcctgcatcccatgactgatttatgtaggctataccctatactcaattttgaactatactcaattttgaacatcgctgaagggtcatcccagctccagatcctcggtaggctcacctgaggcccctgttgcaacagaatcacagatcatctccctctgtcaaatcctgtttttctcacttcttatgggtgtgttgttcctaaaaccactagccaaataaatctgtagcacacaaatcttaaagattcagattctatttcttggaaattcattttacaagtgaagaatctgaagttttattatttcacccaagcccatgtaggcaatatgtggtgggattaggatgctgtctccaaatgtcatgcatgttgtaaaagcccagcaattagaaatggggttcaaggttggaaatggcccttataaggttaggcctttaccaggtttaatttttcaatttcaggttggcagtccaaagtctcaaaattagtcaaaagtgttgtgcaaaggtaaaaaacatataaaggtagagtggatatgtccaagtgtccccaatagcaggaagagggtaagagctaatgagcaaatgaagcttggtggaagtattgacaactagaagaagattttcacaccatttttttatatgggggctttgctaataagtcaattccactaagcagctacttatttgaccttattatttccaatatgtaataaaaattggaagatcaaaataaagaactataaacaacataaaatatttatgagaaatcatgtttaaagaacgtattaatgacattgaaaacaggtcctgaatctagaatggctgtacataagagagaaaatgagtacttatattaaaaatatgtatatgttggctatgaaaatggcaaaatcagataatgctaatattaactttcaatattttcaatattttctgaatgccagatatatatatatatatatatatatatatatatatatatatatatattactaaccagggaaaggatgatgatttaacattttgaactcttttagtaataacacattaattcaatcaacaatatttattgcgaacctactatgtaccagacagtgttctaagcaatgggaatagaacaatgaatgagaaacatggtccctgtcacaagaccgtatatcataccagaggtagggagacagtcaacaagcaaacacatatggaaacaaggcctctctgtcagctgacctctaagcagtgaggtttcaaccacttcaggatctgtgagaagagccttctaggcaaaagaccaatgtagaaccctatgagggaataggaagaactttggaaaacagaaagaaaagcagtatggctgaagcagagcaagtgatggggaaggtatagatgaggctttagggttaggtaagagcccatcacttgtgggctaggaaagagaatttggattttattctaggtgtgatgataagtttttagtgtgttctgaacaatagaatgacatgatcctttttttataagatcattctgactttagagtgtccctgaaaaactgagtatattcaatgaacattcaggcattacttattgaactgaagaggagatagttggagagcactacagtatagctgggagaacataagctttgtagtctgatagatctacttcaaaatccatctctgtttctttctaactggaagttatcttctgaattttaggtttcttttttatttgtaaaataggataataaaacttagtttgcagggctatttttaggattggcgactcatgttcagtggctgacacagtgttcgtgctccgtattttgtgatggcaatgaatgtggagtacaggaacataatataaattatactgacttttctctgatctcatttgttgttggtgctataaaggcctgcagataaactctgacccttcttaaagagacaaataattgttttattggccttttagtttcaaaggaagttagacatgaaggcctgctgagactgcgtgactggattatttctttcgtattatttctccctcttttttccccattgtcttgaaattgtgtacctcagacctactgtttttgttgtctccagatcacacagagcaacttttgatggaaacttgggctcaccagcatacatttttgcagtgtgtgcatttgcacttaacaattctcttcttggctttagcaatgattcaagaaaaagaccccagagaagaccaaggtcatccaacttgtttaacaggctttttaggactaggggactcagatagagctcagcagtggcatatcttagaaaatgttatgtttggaaattcttttcttctgaggtggcagtgagatgcaagagttgatataccagggctacttgctttgagggcatgcatcaaggacaaggaaccccagcaatctcctccaatgttgcatttttaggattttgtttaaagtgaaaaaaataggaggaagaggaggaaattgggagataaggactcagatacagaagcaggaaggttgcctctgtttttttcagtgagtgattctctttgtacagtgctattcacattttcccacaatataatggttcacaaaatttgtaaggtccaggtgatcctctcaacttcccatatattagagacagctttgggtatcaccatcaaacaagtatctgaagaaatctcaatgaatgttattattattattgcttatttatgaatctcatttcacaaacttgggaataaagtaaatattactgtctttactttcactaatgtatcctaatttctgtctccgagtcctattttgcttacctagtagaaaacttaagcttaggtctttctggcattctcaacctcaagagtgaatcacaattccttgggcttactgcaaagtatgaatataggacaaccttgtcttgagtcattgagcctacaggctgacttgaccataagaagtctgttgtttctatcctcatagcttctttaggtttactataacagcatgtgttacctccttgtaatccttggggcccaggaatcttaagcaagtcttcctttgatcctctctgcctagaagccatctccttcctggtgtcttgctaccttctcaatatactttggggaagcagagcccaggccctttgtactcttaggccccaaacctggaaggtggggagtaggagggagttggtagctggagttgggctttcactctctatatgtcccttttatctactgtcctaaaagctttctgactttccctatttctcccctgggagacaagtgagctcagggcctgcctcttgcttcagtggaagagaagggaataggaaaaaggcagagagagaaatgcataggttgctatctcaaaactatatacacaaaactggaaaaaaaaaaaaaagacttctaaggctgcccttaaagagtggaatcttttctaagatgagatagagattacagatgaatatgttgaaaccaaaagaacagttttcttgttgtgccagaaccatgctggcttcctagggaaaacatactctgattcagccagagaaacaattatgtcttaggcagatagttacaaagctggcaccatggagttgctttgaataaaccaaagcaattatgtggtcatttaaaaacttctctattttataattgaatgcactaagatagaagtggtacctagaagagcagaactctcaaaggtaccacggccttttaccacatctctcctgagcctctcttttatttttacagtatttgattcttctctttttgatatttcagggctggaggaaactcctactcatgttatcagacactgtatgccttattttacatatgtgcttagactcagcgtccaaagggtaccattgtggcttgttgggctgaacatgggtccttgacttgggaagcataggtacacgttccttgctacacttaattcatttggtggtctttaacaggttgcttatgctatctaaggctatttccttattttaaagagagaagtgaaaaatatctaatgcacgattttgttctgagagtcaaatgaaacaatgtgatgagaggttgtttgtaaaatactgttttatacaattatttccttttctccaaaactgtttattacatgtgtgccatgtgccaaatactttgtttggtctaggctttagagccgtgtagataaataaaatgtagtcacttctgtcaagcaatataatctggtgagggagataaaacagaaagatacagcgtgaagtcatatctgtagggatagaactatgtcatatcatgcataattacatagtcgtacaaaaggataatactagaattggcttcctgaagaagttgattcctgggttgagtcttataggatgaagaatttggtggtatgaggtagatgaatgagaaagacatgccaaggtatcaataacagaatgaacagacagtgaagcagcaagcacccatgtgttggtgtgtattggtggaagcagagggtggacagacatatcaatatagctggcacttacagttggaagcaatatgtagcttgagataaatataggcaggtagttaaagaacaaagattactttgatgaagaactcagatgtaattttttaggtgatgagaaatcattgaagagttttataccatcagatttttactttttatagataaccctaatgaagggattcgcagtgtcagcagttaatttgagttatcaggactagaatcagagagacaagtcagtctcgccatcaggggaagcaatgatgaagatctgaattagcacactggcaataagaatagagtgtgaagaatagggcaatgcttggagattgacttggctcttggagataatgattgaaatatggaaatcaaggatgattgatgccaatgactgggaacacatatagagatagaaacaagtttaggagtggataaatttagtttggggtgctcaatttgagggctatgtgaggcattcagtttgagatacacattcagatgctggaattatgaacatgaacctcagagaagagatctgggccaataatatagatgtattcgtatacttaataagtacagcttgagagactgcaaccatagaagtctcgtggtcaatttttgctctccaatactctcattttgataattaaaatatctggtttcatatggtagttaaatttcaagtttgcattttaagctaaagaatctgccctcccaaactttggacatgaaaaagatggaatgagggaggaaaaattgggccatgaaaggtctctcttgactaataccaatgtaatctggtattgggttgatctggttgtttcagatgtttcaaggtgattctttctcttgtgggtactttcatgggctcattgaagaattgcctactgaactatgctaattatagctcccttgatgtcagcagtgtgtatccttaggctggctacttacagccccttcccatccctcccactcaccatgcagttccactttttaatggtccactagtaccaccctaatctaagatatcctttctactttaagttctgctcaggtgctatagcatttatcctgaaacatggactagttgatatttgttcttccagggcttcaaccaaaaccaaagtagaatgaaccccatttttatcttctatttcagagatatgtgaattgttcaattagaagtggtaattgaaatgatgagatcctttttcttcccaccttcaccctcgcagtaagaatgctcacaaaggggcagggcacagtggctcatgcctgtaatcccagtactttgtactttgggaggccaaggcgggcagatctcctgaggtcaggagtttgagatcagcctggccaacatgatgaaaccccatctctactaaaaatacaaaaattagatgggcgtggtggcaggtgcctgtaatcccagctactcggtaggctggggttgaacccaggaggcagaggttgcagtgagccaagattgcacaactgcaatccagtctgaacgacagagcaagactccctctcaaaaaaaaaaaaaaaaaaaaaaaagaatgttcaaaaaggaagataactggaatgcaaaatacaaacagattgctgggagacaaaccatcattcagaaagtgagctaaggcagggaaggacagagacagagaagcaatggttgagatagaaggagaacctggagagtaaggagtcaaataaattacagagtaaagaggtctaagaaggaggacatagtcaacatatgggatgttgtgaagagatgcaatattatgaggactaggataggaaaatattagattttgctatgagatcaattgctatccttgcaaggaaatccagttagagaaagggaaatggcaagggtttttgagaagtgtggatgaaagaggagaaatattagatattagatacaggagatgtggggtcaatatagagtttttagaattggagaagccagcaatgttcacaggctgagggaaaacaggcatagtgagggcttatttgaagagccaggaaggaagaaggataattgatggtagatggttaaagctgattatttctcttttgggcacttttgatgtctcgtggggtgtaggaaggaaggagatcaagagcatagtgaagaggttaggactgattagaaggaggggtagctcatccgctgaaaaaggagaagtgtgacataagcatgcattttgatttgtttgttcatagtggcagaaagctgaatgagatcatgtctgatggctttaattttctcactgaaataggggataaggctctgtgctaagtgtggtgaaccaggatctgagtcacttctaatccactcatttagaaattataaagactgaactgaatggagtggtattattatacctaacatacagatctggaatctgtgattcagaacacttaagtggcttgcttgaggctaccctagtggctaatgttagagtctggacagcatgaagagtccccagatcatcaggttattggcacttgacagtctcaagaaattcttatgttccatctttatcggcccatcaaagaataagaggtaaaaatagaaaattgcaaaaggagttgtaaatttatatattctttatcacctttcccctctcctttttataaccaaactttaacatttactgaatatctaatatcttctagtcactgtgataaacgctattctgggaaatcaaatatgtagctgatttatagtgagcacttattatgtatcaggaactattctaagtattttatgcttataaatgaatgtaattattttatgaatgtaatgaggctggagaactcttgtctccatattatagagaaagaaactgaagtccagtgatgttagctgacttaaacacagatattaaatgacaaagctaggcttgtctagctacagttcccacagtttaaatcattacaatatacgtagtttctactctcaaggaacttaccttcttttgggaaagcaaaaggaaaacatggttggttttaacaaataaagcaatcaaaagccagatgatataacactacagaaaaagtaatggcctggcactgtgggtcacgcctgtaatcccaacactttgggaggccaaggtggttggatcacctgagatcaggagttcgagatgagcctggccaacatggtgaaatcccgtctctactaaaaatacaaaaatttgctgggcatggtggcgggcacctgtaatcccagctacttgggaggctgaggcaggagaatggcttaaaccctggaggcggaggttgcagtgagccgagatcatgccactatactccagcctgggcaaccaagcaaggtcgagcaagactccatatctacagattcaaaagaaaagtaataatatgggccatcatgaattgcaaaatgactaggcatttagagatacaggaaagagatgtcagatggactagattgtctgacaggtaggattaatacattttgttaatacaacactaatggctaacaggtgtttgttgaatttagttgatcaaagagaaatagtccagtcagccttatcatttatgtgcacatatataaaactttagacctttatattaaacccaaatcaccaagctggactttgccttctttcaagtgttttcccttagaacttttattgccagcaaacctaagctataacctttccagccactgggataggttctactaacactgaactccaaaaacacctctccaagtgggagagggccttgatctttttccttttagctaaggaagctctttgaccaccataaaaatttgctggttttctccctactttatcaacatatcaaaggtatactgagaaaggcagcttatattgggacccaaaaggtctaattataacctctgtatttgttttctattgttgatgttacaaattaccacaaattaagtggcttagaataccaaccacttattgtctcatggttctattcatcagaagtccaagtacagcatggttcaactgcttgaaatctccaagccaaaatcaatgtgtcagcatgtctgccttcctttctggaggttctaaggatgaagttgctttaagttcatgaagattgttggcacaattcagttccttgtgcctgtagggctgaggtccctgttttcttgccgaaaaccaaccaggaaactctcttagctccttaatactggccagtttcctcatcccattgttccctccatcttcaagccagcaaaggcacgcccttctaatgcttcaaatctcctgggctttccacatcgctctccctccagtaggagaatgttctctactttaagagctcatgggattagattgggcccatcaggatattccaatatcgtcttcctatcataaggtctgtaaccttaatggtatctgcaaagtctcttttatcatttaatgtaacatatctatgaattctaagggattaggggatcagcatcttctgagatccttctgcccactctaccatccccctagaaacaagggagcattactcagaatagccacttaaataattccccctcccccctcaaaaaaaaaaaaaaaaacaaaaaacaacaaccaatgggccaaacatacaaaaaccacatctgcaccagagccaggtatctgctgactctccagctctagtcagagaagaggtgaacatgttttgaaaggaaatatttttcatcaggcatcccattgtatatgttggacgttagaccattctttacctatatgaggtacttagtaaatagtagctgctgtgatggtgatgaaggcagtgatcccactagactcaacttaagacagaatgctagctactgaagcagattcaaagcaatcaaacttagcttttgccttagggaaaatgacaggtacacaaacacaggatggagcagtaaacgccttgaaaagagggacctttttttttccttttgatggctgttcttgatgcttgttttaaactgttatcacccaattaaaaatgatgcaaagggtggaaagcagggtttgttaacacgggatttaccccaactgccactcacttcctgtgtagtgccaatcttgcaaatccagaaaggccagccactcgaaaccgcctcagagagggccaggaaccaggaaaggtcagcaaagcctcttggatttaaagtaaagaaccaggaaacaaagggctcaacgcaacttttacaactacaaattaaatgcaaaaaatgacacatcattacataagcagcataaaatataatttaaatgtcaaaagaactgaagattcttgaatcatgtaagaaaaacttgcagaatgtgttaaatgtctcaatttgtactataccaaaaaaaagtaaaaagtaaaaatggcattgttttataatgcaaaaatacagaaatcagtcttgttttcctgctgtttatagaaatccttaggcttattttagccaactttaaaaatattcatcttttaaaaattctcatgactttcagggactgtggatatatttgaggataagagggtattatttaacttaagacagtgcttaaatgtgatatgtgtgcctattaaagttacagttaaatcttttatatggatgcattttcattgggaggagtaggcgtttcacagattgctctactacttggaatatgatttcacatacatttttgctctcttgaaaattagctttgtggcaattggtttccctacttctgccacccacttacattttagatctttgttttgaagcttgtgagatatatttaacaacatcatattaacattttaggtctctgtctgaatacagtagttccacattctttggcagatgcagaatttttctagtttttggttgtcaaagatatcaatgtaaacaaagctaaatgtgtgtgtatgtctatacatgcatttgtatgtgtatgtgtgtagtataagctatacctagaaaatttactcttcaatcatttattaaacatttattgagctcttactgtgctccctgccattacctaagcactgagaatactaaggttactaggacacagtaccctggattcagagagctctcagaatattggttgagggaaacttggagcagtatattgtggtaaatggcagccagcagtgcagatagaaagctttgagaatatatatatatatatatatatatatatatatatatatatgaagaaacttactttaaactagggcagaaagaattgagcaaagtttcccgaagatgactttattttagtgaataagtcttatagaagtaatttgtttattcaggtttctaatacttttggcattttctcagattggatgaattcctccagtttagtggaggggacatatgaaggaaaggagagtgagttagggaagaagagagagtgaggagtagtctcagaaagcctcctcagaaagcctcagaaagttatagcctcctgggctcttgcctctgggaagagtatacatacaatacttgccgggcctatgaaaggctggacctgaagggcatcttaggtcagtttcctttatgacaacattttcctggacagtcttcagtagtgctacctgaagtcacataggcttccctcccaggtcggtcattcttcaaactagggcaccaacacaatgtattctgcacctgaggtatcatgaaaacagcaagggagtagaaacatagttgactcttgaacaacataggcattaggggtgctgaaccctcgcacagttccaaatcgaatattacttttattccccccaccaaacttaactactaatagcctactgttgctcagaagcctcgcaggtaacatactcaattaacacatatttgtatatgtattatagactgtattcttacaataaactagattaaagaaaatgttattaagaaaatcacaaggaagaaaaaatatacttattatttattaagtggaaaagggtcatcataaaggtcttcatccttgttatcttcatgttgagcaggttgaggaggaagaggaagggggtggtcttgctgtctcaggggtggcagaggcagaagaaaatttgggataagtggacctgtatgctttaaacctgtatcgttcatgggtcaactttaattctacataacctctaagaaagtcaacagtagtgctaaaagatttaaagtcacttctgccagtttacatgttgctttgcttggctcacttcaaaattaggaaacctataatcctttgccaagaattcagtatgcaaatattttctaataaagaaaatcataggaggaagttgaattttgttgcagtatgccaacacactaacagtggtttttttttaaatttttttgacagaatgcagtgttagaaagcaagcataatagagttcatttacaagaacacctgctttaaaaataaccctactgttaggaggaaacaacttctggactagttcttttgaatggaaaaatccagaaacgaacaggaaataaagttgttgtgtgttacatacagagcatttgcatcatgggaaaagctttatattccttttgaagtgccacaattatgttctcatttaataatattgtaatgtcggtgctttgatcttttgttatctgtccacatttggtaattttgtgtcttacagccttcagttcagaaaaaaagttagtcagaaagaacagttgaaggtttccttcaatactcagttcagctaccagaaaaggtctccacagaagatttctctcccagcatcagagaatgggtgggtaatatagagtaagctaagggagagagaacagttcagctcgcatctgtgcttcgcatctgtgttgtaacaggcatttataaaaggctgtagatgcagtacgaagaccatagcacaggagccacacagctgattagagtaagaagcccagaaaatgctggaagaatcagaagagcatcagtttagttcaaaagatgcttatgaaggacttctcttttgctagacactgaactgcagtaaaagtgaagacaagggtttgtctttgtttctagtgagagaaacaggttcattcacaactaactgtattatgagccatttatacaccaaaatgcagaattcattttagccaggggaagtaaggatgattcattgagtagataatgtttaagtggagacttgacaatagggacaatatttgcaggtagaaaatggaaacgtgggaatggtaggtggatcaggcgttacatctggaatccactgcaacaatctgagcacggttgaagtaaggagtaatgcagagagatgagactaatagggctttggttaattggaacaggacagtgaagtcagaagatccttgatgctgtgccagccagggtgcttctagggtgggaggtgatgccatatagtggaatagcagacactgctgggcatacctccttatgaacaggactctaattctaatttgaaagccaatgtgcttaacataaaatcaccattttctcagaactaccttgtagcaagggatggctatgtaacatagtttaggccattgagacataagcagaagttgaaatataagcagaggacattctgaaagcctcttgaaaaggagaaagacacagctgacatctgcctttttcatgttgccctgcacccttctttctactcgatttgtaggaatgggcagccatcttgtaaccacgatggcagatgtcttgtgggcagatgtcttgtgctaaggatcctagagcaggaagaaataaagagcttggttgagtatctgcaataactcaggtctgcctaccccagactccttgttatgggagaaaaataaacttcttatttgcttaaaccactgtaaccaggtttctgctagagcagctaaattgaatccttactgatatagttggcctgtggggaaaagtgaaaatagttgagcagaaaagttgaatggaagttacaagccctaagaattgcaaggagggagaaaggaaaactttccagattttcccaagtcagtaccgtgcaaacggttccaggtttttttccattgaagaactgcacgttattacatccatccattcaacaattaaacaaatatttatttatttattgtgccactgttatgtgtcagacattttactggatgccagggatacaaaaaggtatatgatgagacccttcaggaagcacatgatctaatagaaacaagcgcgtcaaagttaatcataaatagtttggatttgaaaactgtgatttataaatttataaaaattcctgaaactctagtagagaataaattattttcttccagctgcaccaaagatttggaatgtaaattggttactgatacaaattgagcatccctaatgtgaatatccgaaatgatccaaagttagaaactttaagcattaacatgacactcaaagggaatgctcactggagaatttagacttagattttcagattaaggaggctcaatcattcaacaggtaagtataatgcaattattccaaaaatctgagctccaaaagacttctggtcccaaacatttttggaggataagggatattcaacctgtacattagtgctgcggaataaaagaggccatggtactttttcaccagtgactttgagttaaaggagcacaaaattagtgtctttctaaaggaaaatgaattgagtaactggagaggtattctcttgggagacacatacataccaccagtggacagttatggatggctagtctactttcatacacttccaaaagttcccatctccacttttaaaaaccactgcatcccatcaaaattctaactttttacaatagtagaatggactgatgtgtgaaatagaatctctttatgccttgatgaacctatggtggccgtgagtagcaatctacaaacttgactgctagcttctaaaacaaacatttaatatcagcattaacctattcctttccagacattcatcaaacattattgatcaccccctatatgacagacaccatggaaggtgatgagaaaacaaagtagggtggcatggtgcttgcccttaattttctgggaggctgtgtatcactgcaaaaggaaataggcaaggagcaggctctccagtgcaggcacctaagggaactgcagaaaatacatggatggttaattagtaggaagccaagcagatttgatagtattagagtccaagagaaccttgtagatagtataactagcaatgctggagagcgttgcaacagtgggcaaggctactatttctctgccctgatatttggactttacaaataggtggataaaagttcccaggtatataactgacccttaggtgctatgggctcttatgggctccaaaagccaaaacataggccttttctggggataagggcaccccatcatttatctttgtatgatgaatgcagttatgttttgaagtcttgagtctcagggaactttggaggtcaagtcatttctgagctttttattgaagtagcaatcctgtggtcttcagatgatgggaagtgatttccgcaaaagcttttatgccttaattgcttgtcctttaagaaatgtggtatgagataaaacaaagaaggtgcctttccagccagttcattacagctttgcttcccacagtgcattgttgtgcttctctggataaatactaagtagtgtttttctcctaattatttcctcaaagtgatagtatcagccctgatgttgaataatgatctctgctattattaagattttgtgtgtgtctgtgtgttttgagaattgtgtgactgctatatgactgcaatatttgcttcgcttcacaaaagtcagtcaggacaggaaggcatttgacaggttaactagtccacccctcacttctggaagtaacctttaacatctgctgttagatattcttcttcttttctgttcacagcctaatagaaatatatcaacactactcatcctgaacaagtttaggagaaggccattgcctgggtagcatgcttttttttttttttttttttttttttttgagacggagtctcactctgtcccccaaactggagtgcagtggcgcaatctctgctcactgcaagctccgcctcccaggttcacgccattctcctgcctcagcctcccgagtagctgggactacaggcgccggccaccatgcctggctatttttttgtatttttagtggagatggggtttcacagtgttagccaggatggtctcaaatctcctgaccttgtgatctgcccatctcggcctcccaaagtgctgggattacaggcgtgagccaccgtgcctggcctgggcagtgtgattttatggacttagtctaccatgactttttcccttggatgagcagctaaacagttaccactgttgcacaactccactgttcaaatcagaatctatgtgaatggtggtcctgaagttgtgcaataaaaaatgcacagagtcagacctcacaactctgagctaagatatagatatttgaaatgtgtccaccacatttcaagcatcacactgtttgggagcctgcttgctattctgaagactcaaagttaaatattaaaatttcatgtaaattttgcttctattctattatttgtttaagacacaaatcctattttaaactacgtaccgtagaggaaaattagtgttccattaaaagtgaccatgtttaaaaatctgtactttcttgttcctattgcacactaaaaatgatgggtaaacacaaaggacaaaggacagcttctctaatgagctgtatgcaactctagggcctggaaattcaacccattttgaatttgtggatctatgctctcaagggtttatatatgactacattaataaatcagccaatagacttcaaataggttgacagcatgtgaaatccaagtgaaaaattttgtgcagtgaggagcaattcatgtggaagaaaagcaaaaataacatatttgatcaatatattatacttcagaaagcacttgcacatgagactgtgacctttgtcagtcaaagaccattttcaaattatttgtgttcccattgctataagcaaaagtaaattcctaataaatatttcctaagttaattcttaataaatattcgttatcatatttggcccacctaacagccccgtaaggtcaggaatactatcattttgcaaaggatgaaactgaggttcaatattgacttgcccaagataacactgttagctgatggcaggattgggaaagggaacctgaaccatgtcccgtgattcatcaacagtgcactgtctatgacaccagctaccttccacatgcccacactcacagtttcctcttaataaacacacaatttcaggggagaggaaaaacagtccatgcattttgagttgctttttctggttcaaatgcctggtgcagagtaaaagctattttctaaatctggtaaatcttcttgtctgcttggattcagtcagacttcagaatggaatgagcaaattatagatggcagtaatagggtgcttccagtggggcgtttcttagccactttattctgcttcttggagctccacttggagatgttttaaatcactcaggaagagaaactagagtgagaaagccagacttgtaaggagctctgtcctaacaggtgtctttaatgatttgctattactttatcacttgaggcactaattatttggaacgtacccaagtaaaccctaccaagtcttgcaaaaagacaatagaaatgaggaaaacatgttttctcttctttggggcatcactatttcatctgtatcattaaaagaatacattcttgggccaggcatggtggcttatgcctgtaatcccagcacttagggaggtggagatagatggattcttgaggtcaggagtttgagaccagcctggccaacatggcaaaaccctgtgtgtactaaaaatacaaaacttagccgagcttggtggtgagtacctgtaatttcagctactcgggaggctgaggcacaagaattgcttgaacctgagaggcagtggttgcagtgagcccagattgcaccactgcacttcagcttgtgtgatagagtgagatgctgtctttaaaataataataataataataaaataaataaaataatacattcttaggaacataagaatttgcactagcttccccaaggaattttctatgatctgctcacttgttatctaaatcctgtctattcttgaaggatgctgaaagctttctatgccgattctatttcacacaataatgtccatgtcttactttctatagtttgttgttttttaaacatctttattgatttataatttgcaaagcataaaatttatctttgtaatgtttacaatttaattatttttagtatatttatggaatcgtgcaatcatcaaccacatttaagtttaaaatttttgggtatctcccctaagaaaccctttattaacattcactctccatgagcattcactctctactaccaccatccttagccctaggcaatactaatctattttctgtctctacagatttgcctattctggatatttcaaaaaaatgaaatcttacagtatgtgatcttttgtgattgacttctttcatttagcataatgtttttagggtttattcatgtagcatgtacctgtactttattcctttttattgttggataatattccattgtatggctacaccatattttgtttatccactcatcagttgatgaacatttgggttctttctagtttttgactatcatgaacaatgctgttatgagcatccatgcacaagtttttgtatataactaggagagaaatcgctaggtcatatggtaactatgtttaaccttttgaagaattgccaaattttcccaaagaaggtgtaccgtttttcaatcccttcagcaatgaatgagcattctgatatctccacatccttgccaatgctttttactgtttgcctttgttattttagctaccctagtgagtgttagtggtatacaattgtggttttaatatgcattgctcttgaatgatgatggtgagtatcttttcatgtgctaatggccatctgtttatattttttttgagaaacatctatctaaatccccatttaaattattatatttttaaactattgagttatttatatattctggacacaagtatgtctgattattgattatataatttgcaaatattttctcctattctatggattgtctttttactcccttgatattatcatttgtagcacattaattttgatgtggtcaaatttgcatttttttcttttgtcacttgtgctgttggtgtcccttctaagaaaccattacctaacaaaaggttatgagaatttactcctgtgctttcttctgcaacttaaggtttgggggtgctggggtgctagtaatcccagaactttgggaagccaagatgggaggatagcttgaaggcaggaatttgagatcagcctgggcaacatagtgagacctatctctccaaaaaagtgaaaaattatccaggtgtggtggcacatgcctgtagtcttagctactcagtaggcggaggcaggagcatcccttgatcccaggagtttgaggatgcagtaagctatgattatgccactgcactccagtctgggtgacacagcaataccctgtctcaaaaaatatataaaataagataaataaaatgaaaaataaagtttggactctgataaattttgaaataattttttaatatgttgtaaggtaggagtccaactgcattctttgttatgtgggtagccagttatctcctcaccatttgttgaaaagactgttctttccccattaaattgttgtggaacccttgtagaaaattaattggccatacatgtgtgagtttatatctggactctcaattcccattccattgatctctatgtatatccttatgctagtatcacactgtcttataactaagactttgaaatcaggaatagtaaatcctacaactttgttctttttcaagatggtgttggctatttaggggcctttgtaaccccataagaattctggaatcagcttttcaatttctgaaagaaaaaaaaagggccaatggaattgtgtcaggcattgcactggctctgaagatcgttttcacattattcattgctaacatatggaaataaaattgatttttatatgttgatcttttgtcctgcaaccttactgaagtcatttattagcactaatatttttctatcagattccttaggattttctatttacaagattatgacatctccaaatataaattgttttacctcttcctttccaacgataatgccttttatttctttttcttgcctaattgtactgactagaatcttcaatataatgttgaaaagatgtggcaagagcagacagcctcgttttgtccctcattataggggaaagcacccagtctttcactgttaaatatgatagtggctgtgggtttttcatagatgtctttcatcggattgcagaaattccattatatccctactttgttaggtattttttcatgaaaggatgtggaatttgttatatgcttttactctgtctattgaaataatcatgtggcttttattctttaatttgtaattatggtctattacattaattaactttcgtatgttaaaccaaccttggattcctgggttaaatcccacttgaccatggtgtctaatgcttttatatgctgctgtatccaattcgctagaattttgttgaggaatttttatatcaatattcatactggatgttagcctgtatttttctttccttgtgatgtcttcacctgattttactatcaaagtagtactgacctcagataatgagttggaaagtgtttcctcttcttttatttgttgaaaaaatagattttataaggatttgcgttacttctttaaatgttggatataattcaccagtaaagccatgtgggtttgaacttttcattgttgggtgtttcgtggaacaaaggacttacaggcaaagagaacagtaaaatgtaatagaacttttttaaggagcaattagaaagcaaaagcagctgaagctgaagtgactccccattgcctacatgttaaaatttaatctcattagtctggttaatggctcttcctaatgtggaacttgctgaacccctccagcttcattcatctcctgtcactatttctctcacactttaagcatcttccatgctgaactcatgataataatagttactctcttccaggcattgtgttaagtctgacaaaatctcaatcaaccattatattcaaattcccagaaataaggctgctcttatttcatgactttgttcatgaagctcttactccccagaatgaactatgcctttattcgtttcttctccctgtctgcctctgtcttgtgaggctgaaaaattcctatctgtggtttaaaactcaccttgagtgtcacctaaataaaacaccagtgaagaatgtctaacaatctgggtactttttgttaatctgtctgtttctcacctattgtaagtcttttgatggcaggcaccatatttgattcatctctttatttccgatcttccagagtgcctgtcacatagtagacactcaataaataattgttgagctaatgaataaacctggctatccagaatgaggctctccccagcattttggagagctgagatgttattgtacttctctatgtttcttatagcacctagtgcaacactgagaaacactcattgaagttaactcgactgaatgataaattaatattataatgtcagtagcacattttgaactcttcagtaaaaagacaccataaaaacctcaaagtagctgtaaaaaatagaaatgataaaaatctgtttagatgacatcttttaagaaaatacaaaaacaattctgttatgttttgatacataattacacttgaagatttttggtgtaacagagctgtgtttgagaattctagtgatcataataacagcactgcttgatgctaggggagggtaaatccattttagaagcttttcaatgacaagctttgttctctgtatctggaagcaattcccagtgctgtttacttaaatgctttataatatggaaaactcaggagcattgtaggatccccaaagacaggagaagatttaatgtttcttaaattctccctctgtcacaagatgaagatgagcaggcagggtggcagcactggctgtggcagcagcagcacaccaccacctatgcaaggtctgtactttttaacacagcattggaagccagtatcagtcatggttctccagagaaacagaactgatgaggtatgtatatgtacatatatataaaatatatatatgattaagtgtgtgcatatatatgtgtgtgtgtgtgtatacacatatatatatttatatatgtgtatacacacacacacacacacacacacacacacacacactaagaagtttattgtaaggaaccagctcacatagttgtgggatctggcaagtccaaaatttgtagggcaagccaacagactagaaactcagtcgggagtcaatgttgtagtcttgagtctgaaattaataggttaggctagcagactggaaacttaagcagatgtcagtgctagagtcttgaggcagaatttcttcttctctgggaaatgtgtttttgctcttaaggtcttcagctgagcaggagaccccacatgcattattgagagtaatctccttaacataaagtcagctgattgtagatgttaaccacatctacaaaacatctttgcagcaacatacagattattgtttgattaaataagtgagtactatagcctagccaagttgatacatagaactaatcatcacaaggtcctttgacacatggaacatgcttccctctcccaccttgtattttccatgacttctcatgccccacaccagattgcaaagctgctctgaagaagccctgcagttctctgccttttggtgcctttgctgttttctccatccctactctagattctctctcctcccagtgtccaacccagttgtcaaattcctactctcatctcttggatcctgtgcaaatgtcattttccttcccaaaccttggctgctttctggtttaaatatcgtctcttcctctcttgaacccccaacagatgtccttgaagtaaagcctccttgctctgctttgcattatttgtaaatgtattcatggcaaccatcccctctcccttgtaacctgaggggggtcaagaacctcatgggtttttttgttttgttttgtcttgttttattttaatgtctttgttcccaaaagggtatagagcttccattcatatggcaatctttattctttttctgtgccctgtgctgtgctagcttctcaggaatatgaagattaattagacaagtttccagcactctgagactttatagcccagtgcggaaggcagataagtcaaccgtaggtgtccacaagaactcattgaactgaattaattctggctgtagaagtgcagtcactttccttttagtatctccttacctcaatactcctacatacagacattagccagaccagacagcaggcttgtagtgggctggaaaggtctgtcctcacaagacttatagaggagtagtgtgtgtgatgtgacctgaggggcatcaaggaggttcgctgatccaaaaatatctctgttgctaagatgcctgatataccatcatttgtgattcattcatctgggttcagaattatcctatctctaaatgcacctgggaggaattactaaatgcctacattaactttttaaaattcttttcccttctttctttacctttttatcttccctttctcctttaaggcagctaaattgctctccctgaaagactcccaccacacaaaggagttaagagctcctccccttggtcccaatagcacctcgtgcctgttacagcagagatgttttatcctctaattcttatctgtttattgcttacctgagctcctccaccagactgagctcttaaaggggaaaactgtttttcatctctgtaatctgaacatagagcacagtgccaaacacaccgtggaatgttctgtaagattcctggaatgaccaggcggttctccatgaagatatacctgtttacccttcttctttgatagaatgacccatgagcatatgtaggggacaggcttgataaaagagaattgaagggcaaagagaagagaagagagataggaaaaaagggactctcgggaaatcacttctgtgcctagggccgtccttgatcctgctgtctgttgtccactttttggtttcattcatggataaaatgccttgtgaattaaacatgctgttttcttttgttttgcaatacatgatctgaagtaccatcagctggcaggggtttttccagaagcattttgtcaagtggaaaggtggctacacatgctccaattacaaaagcaaaaatgctttcaaatatcttttccttctgcatggattgagaacacaaacctcttctcatgcctgtctcttccattcgctacacctttgcctttgctcaaggaatatgcttgtaaagatatccaaaaagtgctttttccaagccccttgtggttgcagaatgcagacctgcaaaaatttcctcaagtaataggatgggaactataaaattgcatgtaggctggcacagtgtgtaatcttgcactttgggaggctgaggcgcgaggaatgcttgagcccaggaatttgagaccagcctgagcaacatagtgacacctcatctctacaaaaaataagaaaataaggcaggaggatctcttgagcccgggaggttgagtctgcagtgagctctgatcctgccactgcactcctgcctgggaaacaggagtgaaactctgtctctggaaaaaaagaaagttacatatagattggagctgaaatcaagatggaagccaaggtgcctttggagtcagctattttctgtttttctctcattagctgaatgagctctttcttctgctctccttccctccacagactcattccattttcctcttgctcctctttccctatatgtctcttctctttcctcgtgtcttctgcctacctacaatttctgctccctcacaacttcacaggacccatcatggctgccccagacactcactgcctcatgatttcagattcaaaaatatatgcctccacgtagataccccatggttcatacttattttaatctttccagaaatatgttcttaaaattaatttttagcaaggtcaatcaataaattggttcatttgccctaacataatctagagctgattttatattgttacctatcatttgtaaccactagattatttattttttatatatacatatttatatatacatgtgtatatatctatatatacacatatatgctatatatagtacctatagaatgccaagatttgtgctaggtactggcaataccatcatgagaaaacacaaatctgccctagtgatattaatttctaactgattactttccttctaacttgccctcatctaatctaacttcaaatgagttctctttccaacacatgaatcaaaccatgatattccctgcttaaaatcattactgacatttatcatctaaattcacataaggatgttttactacctgcttctgtttttatttctgacccctgcctgatttcttgtactttatgcttctacaaaaccaatgttaatccatgcccttgacttggcacatgacagaatcaggagaagtagaaaagggatgaagtaaagataaacttgagagacaggttgattcagtgtctaaatgttattatcctaactaaagtgtaaatatcacaaaacctaatattaccttaatatagtaaacatttgatatatttttgttagagtggattaaaaagtggcatttgtggttttatctggcttcagattcattaggaatgagtgagtgaaaggaacctaaaagggtgagttcattggtacatgaacaatttaatcctttttcggtctcaatagctattattgtggctaacaaagcaactcttataagttgcacacaaacaagaagtaggagagtgtttatgatgtcatcataaatatttataatagggacatgatacaatgttttgtgagacattgttgagaaaggttagacagtgaatgctcatttagatcaaaatcaaacacctgacacttgttgagcattttttaatttacaaagtatactcacatttattatcctatttaaactcaatttttcaatctacattggaccattatcttcactgggtaagcattctctaatatctccatccttagactccacattccccatcagaaaaaaaaaacaaacaaacctgtatatcttctttcttttacagcaaagcccaagagttgtctatgttcattatcttgactttctcacctaacattcttgcgtcagtcaagtcagatctggtttttgttcccacaacttcactgaaattgcttttatcaaggtcattaggaatgcccatcgtgtctattcactctctcctcctggaaacactcttcttcacttggcttcagacacagtatatttcactggtttcccacctacctcactgggttttgctcctccacacttttaatggtcccgctcctcagttattgtctctcttactcccaaggtgatctcaaccagaccctagttttcaacatgatttgaaagctgatggctcccaatttctatcttcaacccagttctctcccttgagctctaaacttgtgtagccaacagccttcttaactctctttagataggcatctcaaacttacaatcctaaaactgaaccctggaggaccctgctgtaatgccagtgctccccttctcagcaagtggtgctaaattcatgcacagatgccgccctagctgaaaatgtagatgtcatccctaagtcctctcttttctcattcgcagcatcttgtctgtccacacgtccctagaatctgactagttattactacctacacctctgccaacctagagaaagccacctttattgtcacttagacttctggaacagctttttaacttggttcttcacttcctttctagctccttttgcagtgcagccaaagtgatactttcaaatgatccagtggtattccctttacattctgatgaaaacccagttttttctagaacttatagaccttcatgacctgggccctacctttctgttcaaacttagttctaccttaaggtatttgcatttactggctctgtctagaattttcctctaccagaccttctcataattcattccctcaactccttctgattctactcaaaggtaatctctcttcctcatcctacagctttttgtcccttaaccctctttattttccttattcccttactggtcaatatagtatatatttgcttaattatttatgatctctctttctctcagtggaatataattccaagaggtttgttttctcctgtattcccaacatctagaacagtgctataatattgtaggtgtccaacaaatagatattgaatgaaagaatgagatttaaatataaaccttttaactagaagtcaagtgtttttttttcatgatcaaagcccatgtaaaaagtgatcatcttttcatattttttgatatctctagcatattctgaggaagtattttgagaacatgatttcagattcttttggataaatggagatacatgatattagagcacttgtgtaattgcagtttgtgttgatgaggtatgggtttatgatagagacatcagcatcatctccattggtacagaagcatttcacactaatattctactgcatagattgaggcataattccaacagtggcaggagaattgccctaaaaatataggaattcacaaattttaaacttttgacccagtgaaacttaaaagggcagcagagaaaacacaatggtattacaccaaacttaaaagctactgcacagcaacagaaacaatcaagagtgaggagataacctataggatgagaaaaggtaacttgcaaactgtgcacctgacaaggggttaatatccagcaaaagaacaagcaatgctatttcaaaatgggcaaaagacctgaatagacatgtaaatgagtgacaggtatgtcaaaaaaatattcaacatcactaattgtcagggaaatgcaaatcaaaaccacactccagtagagaaaggggaactcatatactgttggtaagaatgtaaattagtacagccattctggaaaatagtaaagagtttcctcaaaaaactaaaactagaagtaccatattatccagcaatcccactactagttatatattcaaagaaaatcagtatgtcaaagagatattgtcactcccatgtttattgccgcattattcacaatagccaaaatacggaatcaaactaagtgcctatcagtgggtaaatgaatacagcaaacatggcatatatacacaacggaatactatccaatcataacacaaaatgaaatcctgtcatttgtggcaacgtggttgaacttggaggacattatgttaagtgaaataagctaggcacagaaagacaaatactgcatgatctcactcatttgtggaatctaaaaaagatgatctcataaaagtagagattagaatagtggttaccagatgctgagaagggtagtgggtaaaggaagatggagagaagttagcaaaagggtacaaacttacagttaggaagaacaagttctgatgttctattacacaataaggtgacacgtaataaaaatgtattgtatatttcaagatagctacgagagagaattttgaaagttatcaccacaaagaatgataaatgttttaagtggtgaatgtgataattaccctgatttgatcattacataatgtgtacatgtattggaacatcacacttaccccataaatatgcacagttattagaggtcatttataaataaaataaaactttttttttttttttgagaaagagcctcactctgttgcccaggctggagtgtagtggcgcattcttggctcactgctttgcctcccaggttcaagcaattctcatgcctcagcctcccaggtagcagggactacaggtggtgtgccaccacgcccagctattttttttttttttgtatttttagtacagaaggggtttcaccatgttggccaggctagtctcaaactcctgacctctcacctgccttggcctcccaaagtgttgggattacaggcatgagccaccacacctggccaaaataaaacttttttaaaaaggagagaaaattcaagtattaaaaagccacttcagacaatctgtttgtaaagtgctatagataataggattttcgacatgggcttgagtaatcttgagggttttgcctggtgcctcaaatcctcgcatactggggtagtgtcttttattcctgtagaaataacgtaaaagctctaatattccctgtctttataggccatgaattaagtgttccctacactttcctgggaagcatttgaaattgcttcaaaatttacagagaatagagcagctgccatttattgtgcacctactgtgtgcccagcattttaagtctgttatcttatttgatctttaagttcctgaattaggtgtttgtagtagacatttatagttttgtcaatctggaatagcctcctccctcttctaggaaatgactcttcccattcacatgctggatgttttaatagggactttacatacagctcttgcctgctggccagaggagttgtctgggaccaagaatgaaccaaatagagtcctcacacaggatttttacagtgggtgttaaaaggggaaaattgtgccctctgatcacaataccataaggcataacccatgccaatgtcccacggtgtagaggagtaggactgagagaatttaccaggtatatggagaatagagacagaccagaaacaagagacccaaaggtgtttgaatcctttctgtcttctttgaggttggcgctgcctctaccctttcaatcctttcaattgcttctttatatgaaccaatggcttcctcatttgcttatgtctatttaattggctatttgacacttgcaattgcaggagctctacatagtgcagtaaattatatctcctttctatggatgcaacccccaacgcataaaaagttaaatcactttttaccagttacgtggctacatgagattaaattcaggtctgtgggttctaataaccttctgctctgtccagtgcattacattgccattctttttacacctctgaaagggtcgcactcagcagatagttaaatatgtgacccaatctatttgtttttttttaaatgtagacaagcatctaatgtagttacaagaataaaaagatatctaagtgtcctcacacacgtccttgcttgtttctttatttgtaaaatggccaagttgaaatctatgacctctgaattttgtttctcatggaaagttgtctaaaatcaaatagattcttagtgcctctgaagatctaattatactgactgtgcctctaggatttatttaaatgtgaaaacaaaaggaggtgcctctatcagacttcatgatcatgagccaagttggcttccagccctccagcaataactctagagtggcactctcagaacatcagtatcttattatttccagatcagactcctatcctaaaagacatgtgtgcattgtcaggaagaaattttaaaatacccagaaacaaccagtcttctggaagatgaaaggcattttttttttccttgaaaattgtagcatacaaccctaaatcttgaaaacgcattattttggattggttgctataagcaccttcctttggcattcaaattgggcatctaacaactcctacagaacatcagcagcgatatagatgattatgctgaaggtaaaattagtacagtgaagcctgtttcagcaccgacatgcacaaacaggtacaggcgtcaaacctgaacacacacacacacacacacaatcacacacaatggtctttttgttttctttttaatgtattctcagaaagggtgctaagaaattgtcccctttgtcagcttttgatactcactcagtctgaagtatcagaataatcttaccctaaatgcatttctggtttaatactcaattctttgtaaaagaaaattggttcactttttaagagcgtctttttccacaggtgctctaattatttttaagttcatattgatatgatattgtattgcttacgagatgttttaatgcaaattacctatgtaaattatttaagttatgtaccaaacctataaggttattattattattatttatatttctcctgcttgtctttcatcatcacagaagctctattattatttgcatttaaagatgaagacactgagggtctatggaacaaatgacatcctgggacacacttcctagctgtgtgtcccaggataaggcagagctaataagtatatcccagaataagtcacttaccccattgatactctactctgacttcagataatgcaaagagcaagggatttacaaccaaacatgtctgggttgaaatctcaaattcacctaccagctttgtgactttaagcaggtgacttaatctcttggatcctttgttctattatctttaaaatgaaggcaataatagccaaattataaacttttagtaagtattaaataagcaactatatgaagcccttagcactcatcagtgtagagtaggtgctcactgaatggtgctagttttaattcaagtgctcttgattgcagaaaaaaaaaagtcacctatttgatgttgattatctgaggatctacggaagctccaaatattcagtgaaacttttatagtgtaacgtggtcagtgctaaggtgccctgaggctctagggatgttctccctcctcactttatccctaattaaaaactaatgcagagggacaagacttgtgatttcataggccctttggtggtaaggttcatggacttctcttttttttttttttttttttttttttttgctattctggtgacccattcacatatagcatctaatctgtgacttccagcgaagggaaagagtcaattccatactcctgtgatgctctcatttgggactggtgtccaacagagcaggtaaactctgtgagagagtgcatcagatcttgggtaagccagccagcttctctctgttccatgactacagatctcagcttgatgcccagcctatgcaggttgagtatcccttatctgaaatgcttgggaccagaagtgtttcagattttggattttttttcaggtattggaatatttgcatatacttacttgttgagcatgccaaatttaaaaatctgaagctcaaaatgctccaatgagcctttcttttgtgcatcatgttggcacccaaaatgtttcagattttggagcatttcagaattgcggtttttggatttgagatgcttcatctgtacttgcttctggtcatagtgtatgaatgaggtggtgctggacgtttgataaactgaggagtgagttaagtactatcagttgttacaataatggatcaattaattatcaattgtgtttttgactgtaagaaacagaagacccaagtcaacttttattacttgaaggcaaatagttctactgtggtcatggaaaggctactgagcttcttttagttcagttttccaatatcctaaatcagggtaataatgctaccatccttctagatttgtcataatgtttcttactgtaagagattagccttagactccaaagaagtgtgctcaactcctttccccgcctcttactagctacagtaatctaatctaattcttcccgagactcacctgcagaatggaattaacaataccttcctcaaaagatgttgtgagtgaccaataagatttactggtaggtaggattgcacagggggcaataccttgcatcacatcccatacactgatgtttgttgaaattaaatctgacgtctgtatatttagtctcttatctattaaatgaagataagggtacttttctcagaagattgtgatggggattaaatgcaatgatatatgtgaaaacactttaggaactctataataatgtataaaagtaattattagtactattaatctcttataattatttgtattataatattacataaccattatattatttttgtatctcttatgatttctaagtcaatagtatagattcttatttttcatattaaagaattactcatgtaaagaaattgcttagaaataaattttcaaatgttttagtccataagatattgtctagagacacatttattataatataccttaacaaaacagtcatgttttagcatgtaaaattgttgagtgaaataatttttaaaatgtcatttaaagttagtgaggttaaaaattagtgaaataaaataagtgctgcctgtttaagtatttaacagctgcccagcttcccatcacacttcagattttcagcaccaccctatagaagatcttcacctggtactggtgtgtgacttactgctaagtgaagctgcctgcttaggtgaggttgttttggtgtcttttatcatgttagctgttgatggacagcctatgtgcatttgtactctcagataacatttattccttgttgtttttcctctagtgagctttaaaaacaagtcttgtggtgcatttgtctataagtatgcaagtccctgccatagactttttccattatttcctgatgttacccagccctctcagctagaaaccaaaatttactccatcaacaagacatgctttagtagatagcaaaaagagagccatttgcagacataatcctagagtaatatatttcgtatgtgtgttcttttttccccaacccaagaaattactactactggtggttcatctcttatgaaaagaccagcaatcaggccgggcacagtggcttacacctgtaatccagtgctttgggaggccaaggtgggtggatcacaaggtcaggagttcgaaaccagcctggccaacatggtgaaaccccatctctactaaaaatacaaaaaaatagcccggcgtggtggcaggtgcctgtaatctcagctactcgggaggctgaggcaggagaattgcttgaacccgggtggctgaggttgcagtgagccaagactgtgccactgcactccagcctggacaacagagagagactccgtctcaaaaaaaaaaaaaaaaaaaaaaaaaaagaaagaaagaaagaaaaagaaagaaagaaagaaaagaccagcgatctctattataggcagtagggcataatgcatttgaaatatagagtctaagaacttaaattcgagccctgactctggatattctgtatgagttactttgagcacgctctgtctctcagacttaatttctttttctttttcttttcttttctttttttttttttttttttgagacagagtctcgctctgtcacccaggctggagtgcagtggcgcgcaatctcagcttactgcaagcaagctccacctcccgggttcatgccattctcctgcctcagcctcccgagtagctgggactacaggtgcccaccaccacgcctggctaatttttgtatttttagtagagacggggtttcactgtgttagccaggatggtctcgatctcctgaccttgagatctgcctgccttggcctcccaaagtgctgggattacaggggtaagccaccacgcctggccacttaatttctataacttacatttgaattcctgcactgctgctatatctaattaaccatttccttggacaagtcatgcaatccttcttaggctcactttctgttataaaatgagaataaaaatttttcatacttcagagaattgttgggaagattaagtaatgtaaagtttgaaaagtatggtttctggtatttataatagctattgttattaatactatgattattttaatattaacatggtagaatttgataagagatgcaaattgcagttcattattttttctaagactattatctgaggggcaatggatttctctcaggaaactcaaagaaatgcatttttcctcctttaattttagtgagctaaataaaattcatcgtaaaagaacttaattgtgcagataatataatttttatagagacaattctaagaagtacacacatacacaaactaaaaaaaaactaataaatgagagttcagcaaggtggcaggatataagatcaatacatacaaatcaattgtaattctatataatagcaatgaataatttgaaaattaaaaaaataattccctttataatagcatcaaaaagaataaaatatttaaaaataaatttgccaaggcagtgcaagacttttatgctgaaaactacaaaacatggtgaagaataattaaggaagacctaaataaatagaagaacgtcctatgttagtggattggaagactcaaattttaagatggtattactccccagattcgtttacagattcaaaataatccttatcaaaattccagttgctttcttttttttggagaaattgacaagctgatcctaggattcatatggaaatgcaagggacctataaaaaacaaatcaaaccttgaggggaaaaaaaaaaaagaaattggaggattcacactttccaatttaaaaatttactaaaatggtagtatagtactgacataaggtagacatatacagattaatagaatagaattgagaggctagaaataaatctatgcctgtataatcaatctatttttgaccaagatgccaaggcaattcaatgggggagtgggggaatcgccttttcaacaaataatacagagacaactggatatccacatgcaaaagaatggaattggacttctaatttactccatgtacaaaaactaaccaaagtgaatcatagatctaaaagtaagagctaaaagcataacaatctaataagaaaacacaggagtaaatattcatgacctagggttagtcaatggtttcttagctatgacaccaattacataaatgacaaagaaaaaatagatgaaatggatttcattaaagtgaaaaactttttgttcttccaaggacgctattaaaacagtgaaagggggctgggcgggttggctcacacctgcaattccaacgctttgggaggccgaggtgggcagatcacgaggtcaggagttagagacaagcctgaccaacatggtgaaaccccacctctactaaaaataaaaaagttagccgggcatggtggcgtgcacctgtaatctaagctactcaggaggctgaggcaggagactagcttgaacccaggaggtggaaattgcagtgagctgagatggtgccactgcactccagcctgggcaatagagcaagactctgtctcaaaaaaaaaaaaaaaaaagtgaaaggacaacccaccgaatgggagaaaatatttgttaatcatgtatctgataagggacatgtttctagaatacacaaagaatacttacaattcaacaacaaaaagccacagaccgtaactaacaaatgggcaaaggatttgaataggcatttctccaaagaagaaacacaaatggacaatgatcatatgaaagtagactgtcataccattagtcattaggaaaatgcaaatcaaaaccacaatgagatattgcttcacacccactaggatggctatggtcaataagacagccgataacaaatgctggagagaatgtagggaaattggaactctcatacatttctggtgggattgtaaaatggtgtgaccatattggaaaagtttgccagtttctcaaaatgttaaacataaagtacaacatgacccagcaagtttacacctatgtttatataccagaaaaatgatcacataaattcatgcaaaaacctgtacatgagtattcataaaagtattattcatacataatagctaaaaagtagaaacaactcaatgacaatcaacataaacaaaatgtgatatatgagtacaatagaatttattttggtagtaaaaagcaataaagtactgatatatgctacaaaatgaatgaatttttaaaactttaagtgaaagaacccatgcaatgtgtgattcaattaacatgaaatattcagaatgggccactccctgttagttaggagtaaatggaaatggagtttccttttggggtgatgaacatggggtgatagtggtgatggttgtaaactgtgaatatattaaaaaccattgaattggacattttataaatgtaaattttacagcatatgaattgtatcttaataaagcagttatttaaaagggaacttaagcattttgatatttctatggaagtgaaaaagaaaataggttacttcctttccattttcaagagtacaagcaaagtctctccctgtggttatggtggtaaattagcgtgaatcatgtggtgaattagccacatgtcatctttaaaattctccttatccaatattcctagatcatctttgctaattttatattttcttcataatctaaaaacaatactttagtagcattctcaaaagtcattgtattgccagattagattaaatgtaacatatgcaccaatgcctctctcttttctgttcagtccttctcaaaaattatattactctccaaacaacctgagaaaataaagccttttcctgtaagagagttaccttgaacattcactctgacccaaaatattattttcatgaaaatcacttctatttattatgaactagaccaactatcttctttctcattagctgaaaacctccagactggcatttgcttttattcatttataaattaattcatttttcaacaaatatttattgagttcctactttgtgttaggcactacagtaggcactgacaataaagcagtgaaaaaatacagaaatcctctttctcctggagtcacattctagtgcaagggtacagatgatacatataataaatatatggtatattagacagtgatgttgtgagaaaaaaaaagcaaaataaagagagtgctgttgtggtagggtggtcagacaagaccttgataacgaggtgacatttgaacaaggactgagtaagtgtgggagtgagctatggagcaaactgggtaagagcacatgaggcagagagaaaagccactgaaaaattccagaggcaggagcatgcctggcatggtgtagtaaccacaaagggtcactgtggcttcagcagtgtggggaatggggagaatgaggaatgaggaccgtacctaccgtcttggagaccgttgtaagaactttggctgtcattgtgaatagaagggaggccaactggaagatgttcagctggttaacgatgtgtgacctgagttacatttctaaagagttatcttagatgctattttgaaaataaactgtagcaggacaagggcataagaggaagtccagttagaaactgtttttcacaattaagtttcgaccatctgtgtacctgtattattttttacacctgttcctactattgcacaaaatgagtcctgtcctgaggtcagcttctctgagacattgtgaggtcaagaagatgagttatgaggcaaatctgaaataaggaaataaggcatcccttccaggaacacagatccaactaaaatgcaggattatcagcatccagaaggaagataaatgacactgtgccctgaaaaacagacaaaggggagaccattcaaacatgccttctcatttgattgcaaaccaatctttttcagtatgagtcatctacattttactcagaaatccagaatgccaggacccttgtcctctctgttgaatgcctttggagtataatttgtcactctgggaaatgccatcagttcttcagggatcagaggatctttgaacctaatactgttgtgtcgggttaattgtgatttcagtggcctttaagtgctattgtatctgcttagaggccagtcttcctgggccagcggtgaaagtttaaatatacaccagcatgcttagagcagtcaggggagttggcaccaaatctgaaagttgaattcattattccagtcacactgttatttctttgtgtaacatagatattttctttgctctctaatcttctgtgatgaaaaagacctataatctctccagggttttcgcctttgttgtggtctcacatatgtcattcaggaaatctgaccccgtgtgttaggtgttctctcatggtgcactgaatgagctaaacaacgcagaacgagtcagacaggaggttggatagctccaaatgcaatgcaaaccagagaaggggagagaattgtatttgattaatcagatcactgtgaactttggctaaaagaaactccagaacatgctgacatatcaccaggaacagaggagaaaatgcaacatgagaatgaaaacagaggatactgtttaaagggagatatttctgcaatttgggaaactcaaattatttcttttttggaggcatattggaaaaaatcctacacgcatcatgggaagctatcattcagatttggctacagattgattttctcactgatttcttaagcaaactattgacaatgttcctgttgaatgcttacatgttgattgttaagtcatttgtatttatatagaaaattatatttactctgcaatagtaagtggcatgccatcagaaagaaaaataaaaggacaaagagttaagtaataattatgtagcagcaagaacacagggaagataatgaaaatgaactaagtccctaggtgtgggatatgaatagcgtaccagcttttcaggatgttgcacattagttcctcaacaacattcgtggatatggtaggtgttggtgatgctatgaacatcaaattttatctgacagttcaggaatgaagctgggagatggtgttatatttaaaaacactgaataatgagaaattttaaataaaatgtttagggaaaatactatgctttgcaaaattatatgatttttaggaaaaatgcattgagtacatttacacattaaaatttccttaccttttcaaaaattataggagtagcttgtgaattgagtggagtttttctgtaagaataaattatctgtttcctcaggtcaggctaccatctgtgaatgatatttatttttgtctacttgaaatttaaatatgactattttaaaaaagcttttccctgttggattcttactaaaagaaatagaagataatgagcagttatgacaaattgtaaagattttctaactactcctagatatatatttttgtgtggctaatgaatagttgatgagtatgtcttttatcctctttttagagctatcagagagatttaaaatagttcatattgcttaaaatatttctggtgtccatgaactgtgtctccattttgaagattaacacagcaaaaacatggaattatgggtggtggaatgcaaagggtatcacaaactagaaccaagcaataatttgtgtagtttttaaactgatttacccttttgtaatattatagtaccaggtttacatgtataacaaagcagaggagtatggccatacattttaaataggagcattgcttgtttggagattaaactttgaactgctctgaatgtcaaggctttttggagagcagaaatcgtggctggcataatttttgtgtgcagtgcctacctggcatgatactttcgggtggtgttgatgagtaaatcagaaaagcaaagcactcttaattaagagttagagttacttactcttaattttgaacataattaattctcataaatcagtccacaattttgcctgctcacatttttttttctaggattggtagaaaatatcagagacattcaaggaaaaggaatttagaatttttactattcccataaaaagtggaattcaaaagaggattttgagtaattgggtcgaaaatgaaatcttttcttcccattttaataacttaagttgaaggcagtcatgtactttatgggatggaatattagtcttctgtaacaaaatataaaaggaagcatttccttgaaactagaaaacatggggttagacagttaagaaggttcttgttggctttcagacttttgatatataactaatgtcattgtaattttctttaaaaagaatatattaaaaagggaaaaattatttaaatttatctgatcacaaaactctttttggaggtgaagtgcctattaatatctcagtggacctctggaacagcctgggtggtgtgatgttgcttcagtgaaacaaacactgcctagagaaccagatcaatactgttgaaaattacagcttgtttaccagctatataacctcaagcaggcctgagctttaattttcttgtgtgtaaatgagtttataatgcttcccttgaaatattgtgaagattgtgatgtaatatgaagcacccagcatagttcctggcacatatgaagcactcaataaaaactaaacttgtattgagaatgaaatataaaaaaaattgatatgtgactcattgtggtgtttaaatgagatgtaaaagtacttagcgcaggaccttgtccaaagaattaactcagcaaattctagctttctttttaaaaaatttcaacttctgtttaagattcagggagtatatgtgcaggtttgttacactcgtatattgtgtgatgctgaggtttggagtacgattgatcccatcatgcaggtaatgagtatagtacctaatgggttgttttccagctctacccttatcccctgcttttggagtctacggtgtttattattcctgtctttgtgtccatgtgtatgcaatgtttagctcccacttataagtgagaacatgaggtatttgcttttctgttcctgcattaattcacttaggatgatggcctccagctgcatccatattgccgcaaaggacatgacttcattttttcttatggctgcatagtattccgtggtgtatatgtaccacattttctttatccaattcactgtgaatgggcacctatggtgattctatgtctttgctattgtgaatagtgctgtgatgaacatatgaatggatgtgtctttttggtagaacaatttattttcctttgggtatatgcccagtaatgggattgctggattgaatgatagttttgttttaagatctttgagaaatttccaaactgctttccacagtggctgacctaatttacattcttaccaacaatatataagtgttcccttttctctgcagcctcatcagaagtattgttttttgatgtgttgatgatagtaattctgactattgtaagatggtagctcatcatagtttttgtttgcatttttctgatgattagtgatgttgagaaatttttaaaagaattaatttagtaaatatcagcttctttccttttttcatctcctcatcttcacattatgtattatgtataagttggcaagctctttttttggaaatccagatcctttcagttataatatgatgtttaaaggaacttttaaaaattacacttatccattgaaatggttgattcactcatctttttggtatgtacttagtactttctatgtaccaggtactgtgctggcttctggaatctgaagttgtataattatcagatagagtgaacccccaaataaatgaatgattataaatcagcatgttaaaacaattattggtgtgtatacagtcttctttgggcacatggatacacctgtatcagattgggggtaaaggaggtgacccataatcagaattttgatggataagtaggccataagtaaacgaaaatcagaaggaagactttccaggcataatatagcatagcatgactcatcctggagaataactattgatgttctaagacacgagaaggaaaatgattgcttgtgacaacgctgaaaaggcaatagggctggataagccctcaagagaacttcaactttctcctgaaagctgtgagggaccataaagatattaaagcagagacgggcataagccaaaatatggggccaacctggagtcagaaactggtcagggtgtttcccatagaagctaagggtgcttccattgaaatcgaattgtattctattttaagaggaaaaaactcaagcaagtgctgctaaacccgcaagagtctatttgaatttacctatagtctttgaggtggcccaatggcttggactactcttatatggcaatttgcagtgatcaaaatggaacatcacaattaaactgttgaattgttaagtggtaaaatgttttcaagattcaacagctgaaggcttggaagcctgcctagagtatccttataagccctctacctgattaagatttatctgtttttatgtaactcactaagagttaagaataactttttattttctccagttgagctaatttgacttacttgggtttttttgtttgttggtttgttttttgatgcagagtcttgctgtgtcacccaggctggactacagtggtttgatcactgctcactgcaacctccacctcttgggctcaaagcaatcctcccacctcagcctcctgagtagcaggagccacgggcttgtgtcaccacacctggctaattttcatatttttggtagagatgggtttttgctgtgttactcaggctggtctcaaactcctgggctcaagcagtctgcctgccttggcctcccaaagtgctgagattacaggtgtcagccactgcacccaactttacttttttaagttactttacctacaaattttttcctgctgaactacagctaatggtgaattcaggtgagaaaataaaatggaactctacattttcaattacaccacgtcaattaattataggttaacgatcacttaaatgcagtaggggagctaaattttatgaactctaggggaaatccttgagcaaagagaagaattatgtttatagtaaaactacttcttaatttatttgtgttatatgtattcattttgtactacatgattctctaaagcaaggcacacttacatttagtaaatttagtaggtggaattatgtatgggcttaacctaaaacagtgttgcctactatattcatccattctcacactgctataaagaactaccttggccaggtgtggtggctcatacctgtaatcccagcactttaggaggccgaggcgggcggatcacaaggtcaggagttcgagaccagcctgaccaacatggtgaaaccccatctctactagaaatacaaaaattagccaggcgtggtggcacatgcctgtaatcccagctactcaggaggctgaggcaggagaatgacttgaacctgggaggtggaggttgcagtgagccgagattgcactccagcctgtgtgacagagccagactccatctcaaaaaaagcaacaacaacaacaacaacaacaacaacaacaacaacaaactacctgagactgggtaatttataaagaaaagagatttgatttactcgcagttccacaggctaaacaggaagcaaggctaggaggcctcaggaaacttacaatcatggcagaagatgaaggggaagcaaggcgcgtcttacatgatggcaggagagagagagggaggaggtgtcacgcttaaaccatcaaatctcatgagctgtccctcactatcaccagaacagcatggaggaacctgcccctatgatccaatcacctcccacctggtccctccctcaacacataagaattacaatttggattacaattctagatgagatttgtgtgggggcacagagccaaaccatatcacctaccaaggcaattatattagaagctaaattatagatgtgtaaacatttccagaaaccagtaaatacttctttattgaactagttgaaaatccatggagcccaacagagtgtatttgtcactgccaaacactgagaagaagccaagtttcagactctgcaagagctcattttgacaaccattaggttacagtcctatgtgtagttctgttgtgaagaatattttgttagctaaaagaagactcattgctttaattatctaagccagtatgagaaaaattgtgcctgagaccaggtccctgtgatgaaaataaaaccggtaaaatagtaacacttggacaaatccaaatatattatctctgactgttagtccctgatagatacagacagcggaaaacttcattccaatcaacaacttttttatttataaacatttaagactttaaaaaaagtattcttttttgggcaccgtggacatttttcttctcttgagatgtgagccttagcacgtgcagtgtgagtgaaatgcctgtactgtctactttggtgaggacaatgtatgtaacatttgaagaatgacattacttcttcctctctatgctatataatagaactgcatacatcctgctccagcagaacacacacttaaaagtcagtcttgtatgaatcatcacatatttgctctctttagcatggaactatgtattaggagggtacaaaataagtgtggtgcacttgcctcaaatttgggacagaaaaacaaactctttctgttaatgagattatttccatgaaatgtcatgcaaaagattttttaggagaaaaaaagattgataaaggacacattcttattcagtttaaaagctatttagtacttagaagctggttaaaggcagatggctcaggctatcagttcagtagacctaaaattgacctgagagctgatttcaggaagggatgttagcttgctcctaagaccttcctccctgtcagaaatgcagcttcctctttgattgcatagttgactcaacaaaggcaagatttcccacgctgaagacagatgggaaaattccaaggttggaggtcgactggcaagaagcaggcagctaatctaacggatagtgtcttgagagaaccccgcctacaaaaccacagatctaacacagcatgggggctaggcatcgcctaaaatctgcaggtccatccactcttggaacattccctgcctgagatcacagctacccaaagcaagctctgttgtgccaatcacagtgaattagtcagatagctaagacttccctcttaaataatgcagtaatttaattttcttgtgataattagaaggttgaaggaaataaatctcttaactatagccctcaatttattcaaatataagtgcagattatagcacagatgaagctatcatattaaaagataatcaagttataaaactggtatttctatcaaggctatttgtatcaactaattaaaagttatcttttgaattaccatgcctgctgaatcagctttcagtaaataatgctaatgtacttcacataaaatagttctatttaaagtaaactatttcttaaatatatgaattattcagactttgttgtggatggtatgcaaagaaacatcctaatcacaactaatctcacaattaatctttattttccttatgtagcataaaactgcattcacttcttaaatgaacacttattgagagtgctactctcttttgctctctggtcagtggccctggcaatacagtacttactaagaattagtccttgccaggttcctgtctaggttcctcctctaatgggagggacagatatctgccaataagaagacaatctgagaaatggcataaaagggctatgcataaagctgcatgaggtcccgaggagagctagcacctgcttcacagaggaggtgacatttgacttcagtctaacagtgtgacaagggaggcagtccagacagagagaaaaacaaatgcaaatgaatggagacagaaatgggcaggactggctcagagaaagataaaacctacagtatggttatgtgtattgtttatttccgtctccctcttgtcccatgttacccctaccacaaactgggatgtgaacaccatgaaggcaagaaatgttgtctgttttgttaattaatatatgccaaatggttagaatggtgtttagcacatggtaagggctcaatgaatacttgtgaaatgagtgaatgcatatgtgtgtgttagagagagttgtaactgtgtgacttgggacttaggcatatccaggaattcaggtgactttgtagaaataacatctgacaagcgttggtctttgaccctcttacctccttgagaatacttgtcctgaaggaagattttatttgaaaactaataatcactctgtaaactttattctgacagcagcaaagtttcaaagcctaaaagatctcattgtccttgagcagtgtcataagctgcaggcaggaaaagtcaagtttaggttgtgtccacagcgcattgaagccagataataaataatgcagactctgtgacattttaggaaccttagttcaaggatatttactgttaggcctctggtgttttattgatttccaagtaagccacaggaatgccctgaagcctttcctaaaggtgggatcatcatggttcagtaaatagtcaaagctttacaggagtcgatacaggctttggtgggcattgttttttttagtaaaaatctagtgaaattccagtcacatcatcaaaaatcactttctaagatacaaaggaccaagtgttagaattggaattataattcacattttaagataccatcaggtagcctcacaatgcctactattccttaaaaaaaaaaaagaaaagacaatgaaaggagaaaattatgtatacatctcttattctaacttagtatttaataaagctcaggataggtaacatattttgaagttaccaagtaatgtttttttctcttctcccccccaaaaaaagaagtcaaaataaacaaaaatttattatattgtttttaaaaactactttaaatatctactctatgccaatttagggtaccttatacccactactttattcttcataacaatctattagataggaactcttatccctgtattgcatattaaaaacaggctgtggcagtgttaactttttcattttcatgaaaaaaatattgagcagaagctgaatgaaaactcggttccgtgttattctaaaactctttctaccatatgataaataaatacaacttttataattactgatttcttgattgctaatggcagtgattttaatttttaagttgttatttataaagtttataaatatttaaattttagttaatgaatatgtttaaattttcttgtggtctttaaaaacagaaaaatgatatttatttcccaatttatccagagctatttggtgctcttaactaaaaagattttcattgtttacaagtgcaagtcaacaaatttttatggcactcatggtatgggcaaggaggactatataagatatgctgcgtgctgaaaatgttgtaaataagtgaaatatcttcaaggaccttttgattacatttggataatgaaatatacatgctcaatatctagtctatgaatgtcaatcaactgttcagaaaaagatctatcttaactttttttttcttttttttgagacggagtttcaatcttgctgcgcaggctggagtgcaatggcgcgatctcggctcactgcaacctccacctccgggttcaagctattctcctgcctcagcctcctgagtagctgggattacaggcacctgccaggaaggactggataatttttttatttttagtagagacgaggtttcaccatgttggccaggctggtctcaaactcctgacctcaggtgatctgcctacctcggcctcccaaagtgctggattacaggcgtgagccaccatgcccggcccttaacttttcatgactttgattgattcaaagttactgattttttcagtttgtcagccttaccatggaaactcactcagcatatgaatttgtaatctcaaagcaccatcatatagtgaatgagcaacaccaggctatataagtgtctgtgcatatttagaaagcaatgataattttttcctttatttgtcaatggtcagtgcaggctgcatatgagatgggtagcaacacagaaaatgatggagggtaggaagtgaacacagaaacagaagttatgtgaagaagatccaggagagtgagaactactcattgcaaatatagccctctttatgggctgctcaaacatcaaaaatgtatttgaaggaaaaaaaaagtatatcataataaatactcagtcaatataaactaacctatttgttccttactgaatttgcaatgtgtaggatgacacagatgccaatcaatagttgctgaatgatgaatagacaaatggtccaggacattcaggtcatttgaacaattgtagttgtcaataaatgattaattagcttgctgtatagactgctgtaggcttccacctctggcttcactgcaatttctggactgacatggtagattgtacacttcttaaaaacacagggaaccctcagagggtgggaattttaaataagtctaagtgtgattctagaacttctagaatcctttcttacgagttcggaatccaatgcttgtttcttcaatgaaaacaaggtccagggaggaaggaaatggggcctaattgaccaagagtccccctaaagatccatccctattctatagaaaggattttaaaacctcattgacaaggtagattaactgaaataataacttctaatgctcatggattcatttaacatttttcaaacacagcatgccattgtgtgcctgtttagtggaaacagaaatgagtaacatgttaatacttttcaggaattcgcagtcaggtagggaggaagccaacatgtgaacgaatacatgtattgcaatctggtaagtgtctgtcatgataaagtatttattaagaggaattaggagatacgtatggaggaaaggggcagaaaatatgtgaacatgtgaaacaacacagcaagttgaggaaatggaaagattatgacacaggtggatattaaaagtcacatcaggaaagtaaagttagaatgtgaatcaagctacgtatcatatagggtttgttgtgacatgttaaggaacagagttttttcataaagtctttgagaagtcctggaggtttgtaagcagggagtggcatggcacaatttataatttaaaaagataatcatagaaataaagctcaagtcagggaactgttcagaaggctgtagcagtaactcaggaaagaaatgataaaaagacatgaattagggcagccattgccagaaaaagagaaaattaattcaaaaaggcaaaagaggtggaatactccagggtaggtaacaacttgggcagctattcacttgtttatgacactggcaagatttgggccgaccactggcagataaaacagattgcccacagttatgaaggggtcttatttgcttttattgttagtggtagtggtgatcagatgtggaaggcaagaatgattctcaagttgatagcttgatttactctgtggactgagagagagagagagaatgtgtgtatgtgtgtccactatctagcactgtgcctggcactgaaacacaataatacatattttaaaataaatatctgaaactaatagctgtcccatttagagtgtctctgaggtgttttattcatgtgtcatttcattattactgtgcatatgcagagtaattcaaggacatgtctctactaagagatgaagctgggtacaaatctgcatgtaacaggcctcaatgcccatatcaataccattgtgctgagtgacaggaatgatgaatctagtcatggtagaaagtttagggcttgctcagttaggaagttcagacttgtaaataatgtacaagatatttggtagcttgaactgtaatttattgtctgtttcacagctaaatgaatgggagaggatgaaaacaaaacttattgtttaaatccaagtactaaagaacactttagatacccacccttgggtaaatattacccgattggcaagaagtttgttattctagctaacctaaactcttagtgctgacatttaaacacatgttctcttgttcgctcctcattgaaaaagcaagtctcctgcacaatggcctttcatatttctggaacctttttattaatttagaggaatacatatcatatatactgttagctaatgggataacataatgagctgatgatactgtttcttggacaatagacaattactgaagaatattgtttctgtgtttcttacccttggccaggttgactttctacattgaatagctttagattctattgagtgtggctacataatcttgagattgacattggtgttttcacccttatttttactcccaatcttctctctactccactttgtagttattttaccaccagcattgtttgccaacaaatactccagaatgaaagggaagatgagattgcagtcagttccctacttttcactctggttagagtgttctatgcctagctttcctagggaactttaaaaacgaacaaaaatctatcttcagtgcatttattagtttgatttgctatgattggccttggatagccttagtagtttgaagttcccttcttttaaaaaaatagagggaaaaaaagatagagcaaagacctttactttaaataattatattaaatgctattttttttgatttcaatatattattatttactcaggcaagaaagaccattcctcaaaaaagggcttaaaaagtcagtaaataatatgttatgcctagcaagcaaaaaagcagttggctctgcttctttctttttggttttattttgaatgtttttgaaataaatgttaattcgcagagcactagcttccttcctgtcagttgtcacagggtttttcggtgtggttgttgtttgcttcctaaatgatggtaaagcttcgttatatctgtacctatttttttctgaacatttggacatttcttggaaacacgtcagaattcatcatttggctttattattgttttggggaaatataataatttgtttagaatttttatacaaaacatatatagagaatgatctttaataattttttaaagagacattaaagaaaattgctctcctatttaagttaaatgttttagtaagcattctcttatttaattcagttttaattgcattattaattatcatgaacaaaatattgctagggaaaaagctgaagagataatctaattgcagcttttactgctttgaatgataaagtacctttgatttggtgctgagccaggagggcttgattgataatatctgtctcagatgtcaccctgggagaaaagaataaaacctcagtagagttggtgcatagcagctgtctccgctgctccaatttttctgccccattgacgtcattgggaggtttcaaaccagtccagggtgtctagtaaacctgcacataaatgaaatgaagaaacagaaaaacagtgattcatagccccactctcactccaaagaggtggctgttatagcctttcagataatgggcagatgttttctcctttactgaattttaaaaagagaaaaaaatatcatcagctatccagaaatgtgggaaagcctcagacaaggaatgtgaattgcgtaagcccttctgaaatcagattatatcacaatgagccacatttgtccaaagttctcagatatcataacctgtatccagcttgtctttaaagtcaggaatatctgaagcagaatgtggcatgggaaacagctttctttggagacaagactgctctcaccacccagaccagttcccaacaccatttcctccccttctgtcttcacaggcagccttttgtgctgagttctaaatgaggggcccccatagacaatgataggaacacagagtagaattacagtgttttccagtaaagatttttttgtttccttgtttggggatatgtcttttttatcagcttaatacattaaatacatgataaactctaatcctccaaataatatcacaaagaaccatttctaaatgctatcacatagcaatttagggatacagctgagcattaatgataaaatatgttcagatgctaatttttcatctgctgggcaatttggctgctgggagcaaaagaatgttctccttttcccctcccctcatttaacacgagcaatgacaggaaggactcataataactgagtagctttcatttcttatttatccgacaagttccatgaaatacagttgaaaaatacctgaatctgtatagcactttaaagtttgcaaagcattatcactttcactttttccagttgcatttgttagacaaaactataaggcagatgttatatttatcaccatgttttccaatcctgtgccctatcttttgaaatcacttcaacttagcagagacgtgttgaccatttattacatgtggtaaattatttaaggtaaaagatacataagatatagttgtcagtcttagtgagcttagagaactgaggacaaaacaagcatccacacgtaccttaaatcacaaggcagaataacataggtgcataagacaaagtgttggcacctgacagtgggtcttgaatgaagggggcatttcagagcaatattcaaagactgataatgtttcaataggtaaagatgatggatgtggccttcgggagtcaagggacctgcgtgaacagagtcaaataggcaagatgatctgagggatgatgggaatgacacaaacaatgtttggaaactgaaggcagggatctggtgaaaggtaggtcaggctattagtggctgaccctaaatgccagggtgagaagtttgtaataataatgagacatttaaatgctgaagctagggagtaaaacaaatctgtcctttagtaaaatccatcaagcagtcaagtgtaaggtacatgagagaaaagaaaatctggctcatggtgccaattaggaggttccatataaatccagggtagggaggtttgaagaaacagaattataggaatttatttgtttaaaaatatttattgagcatctattatctgccagccactattccagaaatgagaatatggcaatcatagacaaactctctgcctttataggtctttcattttagtaaggaagaaatgaaaagcaaagaaaaattttaccaaaagctatgggttagaaccaacagcacttagtaacaggtagttctggatggaagaagattcaggattaacttagtaatttctctatttgagagaacatatcccttaacctgttagctaaaagtgcacttactctatgaatttagccttcttcacgtgctacagtaacacttcacatggataccacatagcttaaatataacgaggtgtagaagcacacttggcaaagcaccaagtaatacataaatattatccttattagttgtgaatggttgtttttactgtattgttattataagaaaatagtaatacctcagagtttttctttttttttttaactctttaactttattgtgccccagtttacttttttttattgtactttaagttttagggtacatgtgcacaacgtgcatgtttgttgcatatgtatacatgtgccatgttggtgtgctgcacccattaactcgtcatttaacattaggtatatctcctaatgctatccctcccccctcctcccaccccacaacaggccctggtgtgtgatgttccccttcctgtgtccatgtgttctcattgttcaattcccacctataagtgagaacatgcggtgtttggtttttttgtccttgcgatagtttgctgagaatgatggtttccagcttcatccatgtccctacaaaggacatgaactcatcgttttttatggctgcgtagtattacatggtgtatatgtgcctcattttcttaatccagtctatcattgttggacatttgggttggttccaaatctttgctattgtgaatagtgccgcaataaacatacgtgtgcatgtgtctttatagcagcatgatttataacccttcgggtatatacccagtaatgggattgctgggtcaaacggtatttctagttctagatccctgaggaatcgccacattgacttccacaatggttgaactagtttacagtcccaccaacagtgtaaaagtgttcctatttctccacatcctctccagcacctgttgtttcctgactttttaatgattgccattctaactggtgtgagatggtatctcattgtggttttgatttgcatttctctgatggccagtgatgatgagcattttttcatgtgttttttggctgcataaatgtcttcttttgagaagtgtctgttatcttcttcgcccactggttgatggagttgttttttcttgtaaatttgtttgagttcattgtagactctggatattagccctttgtcagatgagtagattgcaaaaattttctcccattctgtaggttgccttttcattctgatggtagtttcttttgctgtgcagaggctctttagtttaattagatcccatttgtcaattttggcttttgttgccattgcttttggtgttttagatatgaagtccttgcccatgcctatgtcttgaatggcattgcctaggttttcttctaggatttttatggttttaggtctaacatttaagtctttaacccatcttgaattaatttttgtataaggtgtaaggaagggatccagtttcagctttctacatatggctagccagttttcccagcaccatttattaaatagggaatcctttccccatttcttgtttttgtcatgtttgtcaaacatcagatagttttagatatgcggcattatttctgagggctctttctgttccattggtctatatctctgttttggtaccagcaccatgctgttttggttactgtagcctcattgtataatttgaagtcaggtagcgtgatgcctccagctttgttcttttggcttaggattcacttggtgatgcgggcccttttttggttccatatgaactttaaagtagttttttccaattcagtgaagaaagtcattggtaacttgatggagatagcatcgaatctataaatcaccttgggcagtatggccattttcacgatattgattcttcctacccatgagcatggaatgttcttccatttgtttgtatcatcttttatttcattgagcagtggtttgtagttctccttgaagaggtccttcacgtcccttataagttggattcctaggtattttattctctttgaagcaattgtgaatgggagttcagtcatgatttggctctgtttgtctgttattggtgtataagaatgcttgtgatttttgctcatcgattttgtatcctcagactttgctgaagttgcctatcagcttaaggagattttgggctgagaccatggggttttctagatatacaatcatctcatctgcaaacagggacaatttgacttcctcttttcctaattgaataccctttatttccttctcctgcctaattgcccgggccagagcttccaacactatgttgaataggagtgatgagagagggcatccctgtcttgtgccagttttcaaagggaatccttccagtttgtgcccattcagtatgatattggctgtgggtttgtcatagatggctcttattattttgagatatgtcccatcaatacctaatttattgagagtttttagtatgaaggttgttgaattttgtcaaaggccttttctgcatctgttgagataatcatgtagttttggtcgttggttctgtttatatgctggattacgtttattgatttgcatatgttgaaccagccttgcatcccagggatgaagcccacttgatcatggtggataagctttttgatgtgctgctggattcagtttgccagtattttactgaggatttttgcatcaatgttcatcaagaatattggtctaaaattctcttttttggttgtgtctctgccagtctttggtatcaggatgatgctggccgcataaaatgcattagggaggattccctctttttctgttgattggaatagtttcagaaggaatggtaccagttcctccttgtacctctggtagaatttggctgtgaatccatctggtcctggactctttttggttggtaagctattgattattgccacaatttcagaccctgttattggtctattcaaagatttaacttcttcctggtttagtcttgggagggcatatgtgtcgaagaatttatccatttcttctagattttctagtttatttgcgtagaggtgtttgtagtattctctgatggtagttggtatttctgtgggatctgtggtgatatcccctttatcattttttattgcatctgtttgattcttctctcttttcttctttattagtcttgctagcggtctatcaattttgttgatcctttcaaaaaaccagctcctggattcattgatttttttgaagggttttctgtgtctctatttccttcagttctgctctgattttagttatttcttgccttctgctagcttttgaaagtgtttgctcttgcttttctagttcttttaattgtgatgttggggtgtcaattttagatctttcctgctttctcttgtgggcatttagtgctataaatttccctctacacactgctttgaatgtgtcccagagattctggtatgttgtgtctttgttctcgttggtttcaaagaacatctttatttctgccttcattttgttatgtacccagtagtcattcaggagcaggttgttcagtttccatgtagttgagtagttttgagtgagtttcttaatcctgagttctagtttgattgcactgtggtctgagagacagtttgttataatttctgttcttttacatttgttgaggagtgttttacttccaactatgtggtcaattttgcaataggtgtggtgtggtgctgaaaagaatgtatattctgttgatttggggtggagagttctgtagatagctattaggtccacttggtgcagagctgaattcaattcctgggtatccttgttaactttctgtctcgttgatctgtctaatgttgacagtggggtgttaaagtctcccattattattgtgtgggagtctaagtctctttgtaggtcacacaggacttgctttatgaatctgggtgctcctgtattgggtgcatatatatttaggatagttagctcttcttgttgaattgatccctttaccattatgtaatggccttctttgtctcttttgatctttgttggtttaaagtctgttttatcagagactaggattgcaacccctgccttttttgttttccatttgcttggtagatcttcctccatgcctttattttgagcctatgtgtgtctctgcacatgagatgggtttcctgaatacagcacactgatcggtcttgactgtttatccaatttgccagtctgtgtcttttaattggagcatttagtccatttacatttaaggttagtattgttatgtgtgaatttgatcctgtcattatgatgttagctgggtattttgctcattagttgacgcagtttcttcctatcctcgatggactttacaatttggcatgtctttgcagtggctggtaccagtttttcctttctatgtttagtgcttccttcaggagctcttttagggcaagcctggtggtgacaaaatctctcagcatttgcttgtctataagtatttcatttctccttcacttatgaagcttagtttggctggatatgaaattctgggttgaaaattcttttctttaagaatgttgaatattggcccccactctctgctggcttgtagagtttctgccaagagatcagctgttagtctgatggtttccctttgtgggtaacctgacctttctctctggctgcccttaacattttttccttcatttcaactttggtgaatctgacaattatatgtcttggagttgctcttctcgaggagtatctttgtggcattctctgtatttcctgaagttgaatgttggcctaccttgctagattggggaagttctcctggataatatcctgcagagtgttttccaacttggttccattctccctgtcactttcaggtacaccaatcagacgtagatttggccttttcacatagtcccatatttcttggaggctttgtttgtttctttttattcttttttctctatacttctcttctcgcttcatttcattcatttgatcttccgtcattgataccctctcttccagttgatcgaataggctattgaggcttgtgcattcgtcacgtagttctcatgccatggttttcagctccctcaggtcctttaaggacttctctgcattggttattctagttggccattcatctaatttttttttcaaggtttttaacttcattgccatgagttcgaacttcctcctttagcttggagtagtttgattgtctgacgccttcttctctcaactcatcaaagtcattctccatccagctttgttccattgctggtgaggagctgcattcctttggaggaggagaggtgctctgctttttagagtttccagtttttctgctctgttttttccccatctttgtggttttatctacctttggtctttgatgatggtgatgaagaaatggggttttggtgtggatgtcctttctgtttgttagttttccttctaacagtcaggactctcagctgcacgtctgttggagtttactggaggtccactccagaccctgtttgcctgggtatcagcagtggaggctgcagaacagctgatattggtgaacagcaaatgttgctgcctgatcattcctctggaagttttgtctcagaggagtacctggccgtgtgagatgtcagtctgcctctactggggggtgcctcccagttaggctactcgggggtcaaggacccacttgaggaggcagtctgtccattctcagatctccagctgcgtgctgggagaaccactattctcttcaaagctgtcagacagggacattgaagtctgcagaggtttttgctgccttttgtttggctatgccctgcccccagaggtggagtctacagaggcaggcaggcctccttgagctgtggtgggctccacccagttcattcttcccagccactttgtttacctactcaagccttggcaatggcgggcacccctcccccagcctcgctgcctgcaaccttgcagtttgatctcagactgctgtgctagcaatgagtgaggctctgtgggcataggaacctctgagccaggcgtgggatataatctcctggtatgccatttgctaagaccattggaagagtgcagtattagggtgggagtgacctgattttccaggtgccatctgtcacccctttctttgactaggaaagggaattccctgactccgtgggcttcctgggtgaggcgatgcctcaccctgctttggctcatactcggtgtgctgcacgtgctgtcctgtacccagtgtccaacactccccagtaagatgaacccggtacctcagttggtaatgcagaaatcacccgtcttctgcgtcactcacgctgggagctgtagactggagctgttcctattcagccatcttgactccaccccctggagtttttcatttggtaaattgtttctcattttaattatttgaaagcaaagagttgaaatatatttatattcattatgtgtcttcaaataatctcagaaaagtttggaccttaccttaccatataatcttttgattttgttgctgctgtgatttctgcttacatgttagtgtagtatacattatgaaaaatggtatgtattgtctagggagctcctaaaacttgtatctaggactccagtacctaatggagaaagaggtcaattcagcaaagaatgtgttttatgtattgataaattttgtgagctacatcctcataagcatttaatactttaaacacttaagcatcttctttgaggttatttatgtgaatgatttattagagagtttaggttatttctcctatacattcacaagtctcataacatttaaaagactgatctgttgctcctgttattagtaaaattcattttacaatgtatatttaaaaattagcagaaattaaaatcttaattcacatcaaagtaaatgtgagccacataatcagattactgtcgagtcaatagactacctagggttatcaataatgaccctacttatgtgtctgcctttttgtcaagttaagaataagaatctacatgcaagtggaaggggagaatcgagagcgttacctagataattgtctttaaggagtattagtcccttttcacgctgctgataaagacatacccgagactgggtaatttataaaggaaaagaggttgaatggactcacagttccacgtggctggggagacttcacaatcatggcagaaggcaaaaggcacgtttcacatagcagcagaccagggggaatgagaaccaagcaaaagggaaaacccttataaaaccatcagatcttgtgagacttattcactaccttgagaatagtatgggggaaaacaccccatgatttcaattatctcccacgggtccctcccacaacacttgggaattatgggagctacaattcaagatgagatttgggtggggacacagccaaaccatatcagaagtctttttaggaaaaataagatgataataaaatgaacttcttacattgataactatccctgatgtactaaaaaaggcttacttggtaagtatttactaatatatatgtgtatgtctagggccttgtgtccaaaactgttctatctctctctctctgtgtctctttgtatcaattgaagactcttttgtgatcctttctacccaactgaagatcaggcagataagcaaataatttgatcagtgacttctttttgcctataaaattttaatttaaaaaaaccatttggtaatcataatcccctgttgtcttttcacttagaatttagactcaaccgaactgatctcaatctctgacaagcccttcccaattctgcccactgcccttctgcatcctcctagctcttctcactgtactgtccttactgtttgcttgtccatatcatgctgtgcttacctatttatatgattctttcacctcttggccatgaaaccccggaagatcatgactgtttccttcatatttatacccattacccctagcggagtctcagtcacctgtgaggttctcaagaaatataggaaatatccgttaaagtgaatattcttttgacaatggagacatggctttcatggtttcggggaaaacttttattgtcctaaaaaagagtccctttatcctttatgccaaatacaaaggctgtatctctcatcaagtcttagggtaatttctgagtcttgagacatatggcaattaataataataataatagcaggagcagcaacagtttactgagcacttggtgtttgccaggcctgtgttaagcaccaaacatataatcatacctcagtctatctatattttgcagatgaagaaacaaaaagtttaaggtacttgcccaaagtcacacaaatataaagacttggtaaagtcaagattaacccaagtttttctgccattaaagcctacttttaacagttatgaagaattgctaaattgacacataacaaatccatttaaaaagatatggattttatttgtacacagagctggaatatgtctgtcagtgtgggaaggtacctgacttcatgatcatatatggaaagaaagtaagatgtttccacaagaaaggaatttcatgttgtttgtctagtcctttaaacatctggatatattttgaaactaattttttaaactgcctttggtttgagtctttgaaaatgaaaaatatattttatgaagcagtcactgttcagggagccaaaatacttgaattctaatctcaactttgtattttaccaaaccagattcctgaaacatcctaggctatttcttggttgtcaaatcaatgatggaatgatattgtaggttcaccatatcccgttccttcctgttcctctagtgtgcttcacttacttcggagaagtcactgaagaccaatttcaaattatttttggtgagaaaaagcctgagacctgtgagggatacttcagggaaatgttatcatctcagagctttaaaataatcatctcccctgggttctccgtggtttggaattcttatgaagcttaatgcgtgaaaaggacaacagttttcaaaatgttggcagtttcctacatttgaccttttaacatttagaaacattggtcaaggtatgtttaaattctttaaattgtagctgacctttggagaaataaacataaattaaggttattacctacatggaatgcttatatggaactattagcaaagtaaaagtagtacgttaagtacaccatggaaaaatgcttttagagactgaaatcattatagtgatagagtcactgagctggaaagaaacttgggaagccatctagttcacccttctgtctgaggccatgtcacatttgaaccataacaagagatttgaaatctttttttttttttttgggagattcaacaacttctcttggtatctagttctagtaactgacaatctcacctgtcagcaagtcgtttttcatagctaacctaaatccctagggctgcactttgaactaactcactttcttctgttcttagatgtagaaaacagctcacataatgactccttttgcacaggaagattgctatcaagatgttattcagctctcatcctaaagccaaattccctgaacctttcttcacaatttctttgtgtctaaccttttagtaacttaccttttgcacatatggctctacccaagtcttcatcttctcaattgtgagacccacaatactatctaatagcatacttagctattatactcgatgaattgcttagttgaatatgctatgttaacatcataacttggatgctgtttctgtttaacaaaacatataatgaaaacttttcctttaaacaatagaaacagaaaacattgtattgacagcaagaaaggttacaagggtgtccatcgccttaaaattccccaatttataaaaatcatggactaaaaatgaataaattaaggaagataatttaacaaatgtttataactcctttacatttctactccatgctgagcagaaggttaatgaagtaaaataagttttggtatcaaacaactccaatttcgtactccatgtaactggacttaatgagcaagtatattctaatttctaaggtttattggcctgatcttgcagaatatgaaaataataaaaaaggtgagttccttgaggacagggtcattcttatttatttttgtatctatgtgagttccttgaggacaagggccatttcttatttatttttgtatctctagggccttccccaattcataacagagattaacactcacttatgtttgaattttactgaaaggttgctcgtgagaattaaatgagattatatatgtgaaaatatttggtcagctgttaaactctatataattgtgagtcattaccattagtaattttaaaagagtgatgattagtaatgagtttttaaaaattaaaccaaactttggtttacagctgtctttccaggaacatttgttattcatttgttgcaaatctacacatgagtttcctaaaattaataatcagtggtacaaagctggccatttggagtttaatgcttagactcttttgagcaaaatgagaatgacaagcgaactcagatgtgaccaaggtgacctcccagagccaatccaaattcactctggcaccagatgaataggactaccctgaaaaatttataattttccagagcttccatgaccttgtgttcatttccctatgtgggagagaaaaatcagtggtatctttgactgacaatagcacccaaaggtttaaataacattgcttcatttattaacaacatgactaaaaggagtctttaagtacttgaccttctttcatggggaacagccaaagggccagaggaatacacggacttaaaaagcagtgtttatgaataatactttagatctttctaaagagcaccatcccctgttttgctatttggtttacaaatacttagtttaagaaagaagaactttggaatcaaagtagttcagattgagatcttagctctgctatacaagtaggtccttgggacaattacttagcttttctaacctcaattttgctttctgtaaaatggaaaatatattacctagctcataagtttcctggcactgttgggttcttggtaacttcattacctcctacaccttctgatctccttcttcacctattttgttagtggcagttggctggctgatatgatttacaaagctagtatgtccaatgtatatgagacccctgcaagaagcagcaaaaactatttgataaacattttattgaatttatttccaagagtggtattgattgcatgataatgacacaaagctataaacctccttcttcacctattttgttagtggtcgttggctggctgatatgatttacaaagctagtatgtccaatgtatacgagacccctgcaagaagcagcaaaaactatttgataaacattttattgaatttatttccaagagtggtattgattgcatgataatgacacaaagctagaaacctcagagaatgtattgctttttgaggaattaacttaaaactagaaaaatacagctttaaatgtaaaaattgactagcctgccaagggcaaatagcataggaaggagttctggaagggcaactggcggccctgggtttaggcccacctgtgccacaaactagaaaaccctggacaagtcacttttcttctctgaactttacttgcttcatctttaaaataggaggatgatgccctaggcctttttctgcatcaacagtctacagagctgagagtcaagcattgatactctcccaaacagatgctgcctaggcacagaagggttcaggctccatcttgttttgctgtcaaaccttcaaaaagtgaggactgtggcctttaggccagcacatctctgtagagaaaacatcagttgccccactgtgaagattctgaaggcagtttggtccctcctcccccaatttattttctagatgaagaacatgctatctcatttagtgagaaagtttgtcacaaaaaagaaaagtcagccataaaaaatgatgagttcatgtcctttgtagggacatggatgaaattggaaatcatcattctcagtaaactatcgcaagaacaaaaaaccaaacaccgcatattctcactcataggtgggaattgaacagtgagatcacatggacacaggaaggggaatatcacactctggggactgtggtggggtggggggaggggggagggatagcattgggagatatacctaatgctagatgacaagttagtgggggtagcgcaccagcatggcacatgtatacatatgtaactaacctacacaatatgcacatgtaccctaaaacttaaagtataacaataataaaaaataacaaaaaagaaacataagagctcaggataaagaaaataacaaaattggaatgcaaaccataccaatttgaaaacaggcaaataatttattttgctaaatcaaatttcagagattgaagtctggatctgtttatgttgccgcagtccctcttgaaattaccaaataggagtatcactcttggtaatttaatttttatggagctggaaggtgtagatatttgtgaatctcccacttaaggcctaaattagatttcttcatttagaataagaaatatgtttaaaaagcatacattttatttttttctccacgttttctgcacctgaaaagggatcgtgtctaattgtatgctcagcttagagccatattcttggcttaacagagataaatcaactcactccactaaactaaaaggcaaaataacttatagatgttaatctctcatagcttgcagcagtctttcctattattagagggagcaaaaaaaatcagccagagacacacatgatatttatacgtatttaaaacggaatattcaggaatgttgtttctcacagttaaacctgtgctgaaatactttacagatatgcaacttaaactacagtgaaaaaccatctttgctgttttcctgtgtgctgatgagaaagaatatacatctcaaagagtagtggtttcttcaaaatccccaatctacatcttggaactctattctgtgcaaattcatttctcctcaaagatgaaaataaataaacttatttaagacttaagggtaaggcaaacaaaaaatgcatagacaaaatttagaatacctaataatctgggatttaacctgaaagtctttaaaatgcactagcatttaatttgagagagagaaaaaaaagaagaccctactgctgtatatttctgttcaaaatttactgctgtttctctggaatagaaaagaagcagtttctgttgagttggcaaattaatgtgcttgaacagaataaagagagcaggccaaggaaatcacactgcttttaatactttctttgcaaagagcttttttggaccaagtccatgactgctacaagtaagtactcagttgcaagaagaatgtgagtagagatcaagtaggctggagctttttgttaattcactcttaatgttactaatgttaatttgaatctggagacttaagatcaaaccaagcggctaatattctgcaaggccccgttccctttcctagtgattcctgggggtagaaatcatttcttaaacctaatataaaaatctactcttctgagtgattgcaaaatagctggtgttagagttctgtatcttacctttctattcacttattatgtgcacagctactttttaaaatattttttctatttataaaagaagtgcataaccatcatggaaaatttataaaagtaacaaaaaacataaacaaaaaaatcatttgtatttgacaaaacattcataaagcatagtcaagctagataagcaaaaagtggcatttattttaagtataattcatcttagagaaactacaatagaaatacatgtgtttccaaagcctcaaagactgttaagattcacttggggcctctttctgctcctctctgcacttctcctgtgtttttattttattttattttattattattatgctttaagttttagggtacttgtgcacaacgtgcaggtttgttacatatgtatacatgtgccatgtcggtgtactgcacccattaactcgtcatttagaattaggtatatctcctaatgctatccctcccccttccccccaccccacaacagtccctggagtgtgatgttgcccttcctgtgtccatgtgttctcgttgttcaattcccacctatgagtgagaacatgcggtgtttggttttttgtccttgtgatagttttctgagagtgatgatttcaagtttcatccatgtccctacaaaggacatgaactcatcattttttatggctgcatagtattccatggtgtatatgtgccacattttcttaatccagtctatcgttgttggacatttgggttggttccaagtctttgctattgtgaataatgctgcaataaacatacgtgtgcatgtgtctttatagcagcatgatttatagtcctttgggtatatacccagtaatgggatggctgggtcaaatggtatttctagttctagatccctgaggaatcgccacactgactgccacaatggttgaactagtttacagtcccaccgacagtgtaaaagtattcctatttctccacatcctctccagcacctgttgtttcctgactttttaatgatcgccattctaactggtgtgagatggtatctcattgcagttttgatttgcatttctctgatggccagtgatgatgagcattttttcatgtgttttttggctgcataaatggcttcttttgagaagtgtctgttcatatccttcgcccactttttttgttttgtttgtttgtttgtttttttcttgtaaatttgtttgagttcattgtagattctggatattagccctttgtcagatgaataggttgcaaaaattttctcccattttgtaagttgcctcccattttgtaggtttctcccattttgacacgatcccttttcaggtgcagaaaatgtggagaaaaaaataaaatgtatgctttttaaacatatttcttattctaaatgaagaaatctaatttaggccttaagtaggagattcacaaatatctacaccttccagctccataaaaattaaattaccaagagtgatactcctatttggtaatttcaagagggactgcagcaacataggttgatggtagtttcttttgctgtgcagaagctcattagtttaattagatcccatttgtcaattttggcttttgttgccattgcttttggtgttttagacatgaagtccttgcccaggcctatgtcctgaatagtattgcctaggttttcttctagggtttttatggttttaggtctaacatttaagtctctaatccatcttgaattaatttttgtataaggtgtaaggaaaggatccagtttcagctttgtacatatggctagccagttttcccagcaccatttattaaatagggaatcctttcaccatttcttgtttttgtcaggtttgtcaaagatcagatagttgtagatatatggcattatttccgagggttctgttctattccattggtctatatctctgttttggtagcagtaccatgctgttttggttactgtagccttatagtatagtttgaagtcaggtagcgtgatgcctccagctttgttcttttggcttaggattgacttggcgatgagggctcttttttggttccatatgaactttacagtagttttttccaattctgtgaagaaagtcattggtagcttgatggggatggcactgaatctataaattaccttgggcagtatggccattttcacgatattgattcttcctacgcgtgagcatggaatgttcttccatttgtttgtatcctcttttatttcattgagcagtggtctgtagttctcctttaagaggtccttcacgtcccttgtaagttggattcctaggtattttattctctttgaagcaattgtgaatgggagttcactcatgatttggctctctgtttgtctgttattggtgtataagaatgcttgtgatttttgtacactgattttgtgtcctgagactttgctgaagttgcttatcagcttaaggagattttgggctgagacagtggggttttctagatatacaatcatgtcatctgcaaacagggagaatttacttcctcttttcctaactaaataccctttatttccttctcctacctaattgccctggccagaacttccaacactatgttgaataggagtggtgagagaggacatccctgtcttgtgccagttttcaaagggaatgcttccagtttttgcccattcagtatgatattggctgtgggtttgtcatagatagctcttattattttgagatacatcccatcaatacctaatttattgagagtttttggaatgaagcattgttgaattttgtcaaaggccttttctgcatctattgagataatcatgtggtttttgtctttggttctgtttatatgctggattacatttattgatttgtgcatgttgagccagccttgcatcccagggatgaagcccacttgatcatggtggataagctttttgatgtgttgctggattcggtttgccagtattttactgaggatttttgcatcaatgttcatcaaggatattggtctaaaattctcttttttggttgtgtctctgccagtctttggtatcaggatgatgctggcctcataaaatgagttagggaggattccctctttttctattgattggaatagtttcagaaggaatggtgccagttcctccttgtacctctggtagaatttggctgtgaatccatctggtcctggactctttttggttggtaagctatttttattgccacaatttcagaccctgttattggtctattcaaagatttaacttcttctttgtttagtcttgggagggcgtatgtgtcgagtaatttatccatttcttctagattttctagtttatttgcgtagaggtgtttgtagtattctctgatggtagttggtatttctgtgggatctgtggtgatatcccctttgtcattttttattgcatctgtttgattcttctctcttttcttctttattagtcttgctagcggtctatcaattttgttgatcctttcaaaaaaccagctcctggattcattgatttttttgaagggttttctgtgtctctatttccttcagttctgctctgattttagttatttcttgccttctgctagcttttgaatgtgtttgctcttgcttttctagttcttttaattgtgatgttggggtgtcaattttagatctttcctgctttctcttgtgggcatttagtgctataaatttccctctacacactgctttgaatgtgtcccacagattctggtatgttgtgtctttgttctcattggtttcaaagaacatctttatttctgccttcattttgttatgtacccagtagtcattcaggagcaggttgttcagtttccatgtagttgagcagttttgagtgagtttcttaatcctgagttctagtttgattgcactgtggtctgagagacagtttgttataatttctgttcttttacatttgttgaggagtgttttactaccaactatgtggtcaattttggaataggggtggtgtggtgctgaaaagaatgtatattctgttgatttggggtggagagttctgtagatatctattaggtccacttggtgcagagctgaattcaattcctgggtatccttgttaactttctgtctcgttgatctgtctaatgttgacagtggggtgttaaagtcttccattattattttgtgggagtctaagtctctttgtaggtcacgcaggacttgctttatgaatctgggtgcgcctgtattgggtgcatatatatttaggatagttagctcttcttgttgaattgatccctttaccattatgtaatggccttctttgtctcttttgatctttgttggtttaaagtctgttttatcagagactaggattgcaacccctgcctttttttgttttccatttgtttggtagatcttcctccatccctttattttgagtctacgtgtgtctcggcacgtgagatgggtttcctgaatacagcacactgatgggtcttgactctttatccaatttgccagtctgtgtcttttaactggagcatttagcccatttacatttaaagttaatattgttatgtgtgaatttgatcctgtcattatgatgttagctggttattttgctcattagttgatgcagtttcttcctagccttgatggtctttataatttggcatgtttttgcagtggctgataccggttgttcatttccatgtttagtgcttccttcaggagctcttttagggcaagcctggtggtgacaaaatctctcagcatttgcttgtctgtaaagtattttatttctccttcacttatgaagcttagtttggctggatatgaaattctgggttgaaaattcttttctttaagaatgttgaatattggcccccactgtcttctggcttgtagagtttctgccgagagatctgctgttactctgatgggcttccctttgtgggtaacctgacctttctctctggctgcccttaacattttttccttcatttcaactttgttgaatctgacaattatatgtcttggagttgctcttctcgaggagtatctttgtggcattctctgtatttcctgaatctgaagttggcctgccttgctagattggggaagttctcctgggtaatatcctgcagagtgttttccaacttggttccattctccctgtcactttcaggtacaccaatcagacgtagatttggtcttttcacatagtcccatatgtcttggagactttgttcgtttctttttattctttttttctcttaacttcccttcttgcttcgtttcattcatttcatcttccatcactgataccctttcttccagttgttcgcatcggctcctgaggcttctgcattcttcatgtagttctcgagccttggctttcagctccatcagctcctttaagcacttctctgcattggttattctagttatccattcatctaattttttttcaaagtttttaacttctttgccattgatttgaatttcctcctttagcttggagtagtttgatcatctgaagccttcttctctcaacttgtcaagtcattctccgtccagctttgttccattactggtgaggaactgcattcctttggaggaggagaggtgctctgctttttagagtttccagtttttctgctctgttttttccccatctttgtggttttatctacttttggtctttgatgatggtgacgtacagatgggtttttagtgtggatgtcctttctgtttgttagttttccttctaacagacaggaccctcagctgcaggtctgttggagtttgctagaggtccattccagaccctgtttgcctgggtatcagcagcggtggctgcagaacagcagattttcgtgaaccgcaaatgctgctgcctgatgggtcctctggaagttttgtctaagaggagtacccggctgtgtgaggtgtcagtctgcccctactgggcagtacctcccagttaggctgctcgggggtcagggacccacttgaggcagcagtctgcctgttgtcagatctccagctgtgtgctgggagaacctctactctcttcaaagctgtcagacagggacgtttaagtttgcagaggttactgctgtctttttgtttgtctgtgccctgcccccataggtggagcctacagaggccggcaggcctccttgagctgtggtgggctccacccagtttgagcttcctggctgctttgtttacctaagcaagcctgggcaatggcaggtgcccctcccccagcctcactgccaccttgcagtctgatctcagactgctgtgctagcaatcaacgagactccatgggcgtaggatcctctgagccatgtgcaggatataatctcctggtgtgccgttttttaagcccattggaaaagcgcagaattagggtgggagtgacccgattttccaggtgccatctgtcaaccttttctttgactaggaaagggaactccctgaccccttgcacttccagagggaggcaatgccttgccctgcttcagctcgctcacggtgtgctgcacccactcttctgcacccactgtctggcactccctagtgagatgaacccagtacctcagatggaaatgcagaaatcacccgtcttctgtgtcgctcatgctgggagctgtagactggagctattcctattcggccatcttggctccaccctctcctgtgttcttaagtattttggtagttcagccttttccaacccatgtgactgaaagcatggccatgcctaagttttagaatttatggctcatctatgcagagaaaaacttaagcattatactctctctcctttcatacttagattatttagaaagagactcatgggcccaactgaggtcaatagcccaccctagcacagtcatatacagcacaggctggggcagaacagtaaaatgtcaagacatagttgcttctactctactcaagtggcctagggaatggggacaaacttcctcaaagaaagaggctgagcaaactttgtaataaatctcccttttaaacttgggatttcttcacccagagataactactgataacatttatatattttttcttctgattttctctttgagcttatgtattctttaatgctgttaaggtaattctgtttgtaattttgaatctagctttttccaatccatctttcttcattagccctcatccatagtttacttttaacaataataactacaaagtaacagcagtgacaataggtagtatgtagcaagtgctgcattgctgttaagaactttgcattatcttattcactctcacaatagaataatatatattaaacctgttcacagtttgctatggcttacaacacactttcatagatattccatttgatcatgccaacaatgttgtgaaagatggcattataattcatttccctttttatgtctaaaatagattctgtctgtgctagaaaggaacattcactaaaagttatacaactagtgaatggtcctctctagccagattttaaatcctgtttccttgagctcatgccctgttgcctcccctggcatttttctgcattcaggtagactgctcagctgttctccatcatcttcatttatgcagtcctgcccctccccttgccagggactttctagacactcacagtgactatagggacaaaaagggaaggtggagaggtgcgctgaagcaatgtgctaggaatcaggggtttctacactatgatctcccaggacactcatggagtggcgatggaagtgtggcttccaagttgtcagacacagtctcttttccctcagaacctgtactgctcctcaccatggcctgccactgctaggcactctcggacctggatattttctctcagggtcacctttttttcttcttccaatccagtttccttcagggaaacttggaatttaccctacaggagtgatattcaattatgagctagcttcagaagatctaccggaaagcttctgattcagtgtccctgaacgttcagcaacaggagagtgtctaggctggagcaaaaagagaatctctagcggggggatacagcctaactccaccctccagcattttatcccagatatagcacaaagaccaaagattagaggtaatctgataatcttgaacaggaaggtagaggaagcagcaagaaggtagaagacttggttaggctaggtataccaaacattctgtattacttcctattttaaaaaaattctttgggtgggataataagagatactgtaaaacgtggatcacatactataatgaccttcattcattttgtaagcagttggcttggttcagaaatgtgcttgccaataataagttgcaggtaaggaaactagtaagtgacagaactgggacctaaaccaggtgatctgggtgtggcttgagtggacgtgggcagccagtcacccatggaacacagagtatggacctgacatcattatgtgtggaagttcagagattgcatggtccactagctcaggaacaggtttcatttgtctttgaatccctagcatgtaagttaaacaaactgcagatatattattagggtcaacatgaggaaaattctgcattacagcccagcttatcatggactgattacttctgctgccctttagtgctgtactgtttgttttccccaggcaaaacatccaaggctgagtccacttggtgaaagattaccaaatcttgtactgaaaggaaatactacatttcccctgtaaatagtaatggaactgactaaataagcccaacttatatggcaaaatttttcaaattcttgaatcaggctgaggtaaatggagttaaaagattaggattttatttttgtttccagagtaacttgtttatactcatgctgtttctttatctattatatttctagtcttcaagtgccattatttcttacaaatcatatgtaaatttataatgatattgttataatattcattaattaaaactcactagcaagattaaagccaatttcttaatgcaatttatagtgttaacaaagatttcagaaactgaaccccaattatttacatagatgatattttgatgttgtaaatatttatgacccatgggtcactgaagatataaattaatttcccatcagttaagaccagcagtttaaggcaaatgaaaaacattttcaaaacaggaatttattgtatttttaataatagctcaactttattgctaacctcgttactggcaagaacttgagagacaaaatcaaatttgggtttctttctaaaattttttaaagttactgggaaacatagtctgtttaatttctcatatgatacacaaaggggaaaaaaactattctaggatgtagtcccagtcgtaatggtgagtcattggctgcagcagtcataatgatagaggattctatttattgctgttctctaagcctcacacaatgaagccaggcagaaattatataattattcctcctggatggatcttctcattcgtttgtaattacaaaatactctttgagtacttttatatcctgaaattaagtcttcagaattgcagaaagaaccgtaaggtttgatctcaggcttgtttatcctccttatattttattttgccaattaatagtgtagcttcccaggtgctaaaatgtgacttctttatcttttgtgtggctcaattacttagactaattttaaataaatcctaagggaaacctcttattttcacaattacatggtatatttttccactgcttataacttcttcctgtatcaattaagtagcttaagttgctaatgttccatgctctctaggtgtgcctctttcaatatttcctgtccttttcgccactgctcataaatggtttctaatcattcttataattgtaccttcttggagccttgagagacaggcacaggttctcttacataggctattattgatattggttgcttttattttccctccaacccccactccagataacaactgttgagtgcgtaccatgtggcaaacaatgggaatgaagagattaatgagccctcaaagaattcatgatttacgtagcacatacttctagctaactgttctagctacaccagccagttctagagaggtacccatggaggttttggatatgtgcttaactccttgaagattcttctggaatgatgcctaaagtaattgtcaagagaagctatgctaatcttcctcttcagaatattcccatttctttcttagttataggtatgaggagtctaaaatatgctttaacatagtaagcttattgttataactggaaccatgcaaaatcttaatttcctataatataatttcttgctcctccaaagtcattcaaatattaaattggacttattctatatgttgcttagtggaaaggtatcacaaataaaaagtgggccacaatgagtaggtcaattaaataaatgcaaaaaatatattgatttattaattacaatataatactgtgctaaatgcttagcttgcattatctcatttaattcttaccaaaactctttgaggtgattattgtatacactcccatttacagatgaaaaactgaggtttaaggaaaagatgtgtatgcccaaatttcttaatgactaaatggcagcagaccaggactgtcttgactacaaagaacatgttctaatactgtacagcttcagactccttcatgagagctgtgatgctcaataatatatgtcaggatatgaatacttagactcatgccagaccatgtcataagccttagacctttttcatttgtgtttatagatagtgaccttttagtgcagtgacaatttcttaccacacagcaatctgcatgcaaggaattgctaatatctgctttgctcagaaggaagcttgtatgtagcattaattatggcaccattaatccattcagttatttattgaaactattatttgttgagtttctgctacatgcttggaagtttcatgtgttatctcctttaaactcactgtaaaaggcatgaggataccaattttctatatctgcagtaattttcccagggttacgtagctcctaactggatgtagtgtcttggattcagacccagctgtttgtctccgaagtctataccaaactaccctggtagtttagagcttatgtttaccagaaatttatgtcccaccagcacgtaatttttaaaccaactctgttgaggtataatttaaataaatgaaatgcacatgttttaagtgtgatacatttggtaagatttgattatgtatatacccttgtagctaccacccccactcaaattatacatttccatcactcagtaaattgctttgtgcccttttgcagtctctcttactccttgccccaggctaccattgatctgatttccatcactgtagactagtttttccaattctagaagttcatataaaaggaatagtacagtatatactcttttttgcctgattttttcacttaatgtaaagttttgtgagattcatacatgttgttgcctattcaatagttcattcttttttattaccaaataatattccattatatcacacatcacatttgtttttccatttgtctcctgatgtgtatatggttgtttctagtatggggtgatgttgaataaagctgctatgagcgttcgtatcccagttttattggctcatccactgttgtccaaaagaatttcttgaactctgcatttgtcctgaaggattctctgattgttcttcatacaagaactctaggaatataacatggaatccagctaatttctgaaactcatgtatttaattatacatttacactaacggccgtgtgcactgagaaaaatcctcctgattaatggcattgcttttagagtcagtgatcttttatttctcatgcaagtcatagtcaccactgtcagtcaggcttctcagttccaagcaactgaaaccaatcctggctcccttaaaaagtagatgaatctggccaggcatagtggctcacgcctgtaatcccagcattttgggaggtcaagccgggcagatcacgaggtcaagagattgagaccagcctgaccaacatggtgaaactctgtctttactaaaaatacaaaaattagttgggtgtggtagtgcgcgcttgtagtcccggctacttgggagactgaggcaggagaatcgcttgaacccgggaagcgtaggttgcagtgagccaagatcgcaccactgcactccagcctgggtgacagagtgagactccatctcaaaaaaaaaaaaaaaaaaaaaaaagaaaaaggaaaaaaagaaaagaaaagaaagtagctgaatctatgaacaggggagagggtagttcatacatacaatcacaggaacctatagaacgaggtttgccaaacaggcaggagcaagaaaaactaggcagctgccaggtccacagccaaagtcatataaaaaaaatcaatctgttgcagacactgctgtcacagctactgacattagactcatcgtttctgctcctgatcataagaccatattagttatgcatgactcactttccagtacctattccatttcttttttgccttcagatggttgtgtctaagaaatttccagaagtcctcaacctgggtgggataagagtagtagaacaagagtagtgggcagcctagaggtgtggaccaaaagcacttgccttctaattatgacatcagggcttgcttaagcagttcctcctgatgacagagcacagcagggcagggtatgcctgactgtaagaagtgtaaaaagataagatgtaccattcatggacagccttgccacatggtcacctgaattccgcgtgatatgaacataatattacaaggtttatagatttaatctctcctaatactcagacactatccaggtgcaacttatttgtataaaagacatggctttctccagctaatcatattatacgttccaagtctcttctctctccttaaattctggatgagtatttcacacctttgcctctctttaaactctcaaaacctatccccactctcagctgatgatgcttctttctaatttactgagtagacagaagcaataaggactttcacagactcccagttgataggacctgcactcaaatactctactttcctgcctatagattaattatctatgctcctatctaaggcaaattaaataataatgctgtataatggagtaaatgattttggtttattaataataaaataacactctgctaagttctatgcatgcatcatctcatttaatcctctcagcattttcacgtgggtgctttaattagccctggtttataaataaactgtaacttaggggagcgaagtaacttgtctaatgttctacaactagtatttggcagcagaccaagtttgcgtaactttgaaagcttcagaaaatttttaatcccaactttgtgatgttttcagtgtatcatagaacatagcattgttgatcatcaggtctctcattccaggttacccgataagccttcagcctgcatcccagctggcggatattcttacccagtgtgaaacccaaacctttatacttggtgaatctaacccttgagaccctgaatgcatttcacaaacagagatttttcttgctttctaccaccaggcatggagtatccaaaagtactccagcacattccttggatacctcaatattattctctgccctctttgtgcagcagcaactatttaccaagcctatgaacaaacttggatgtggaccttagtctcctcttccaagatatatcacacaaggttcagccactgggaaactttctcttccccactgtccttcatggccaactctaggtgacctcccctatttcatgtcacagaatctgcttacagttggtaccaaacctttccatcctctttctctcataacctaagtaaaggcccaatgggcctgaccctccattacttttctgacatccactttccttcttactcttttgtctttctgtacataggcatccatacttttcctcatgccatgccagcctttgctcttgctgttattctgtctgaaatgtccctcatcccaatatccacgtgaaaactccctcctcttctagcgtttgcttgaatctcacattctccaggaggcctagctttcccctcctctctcaccagaactcctgatctacactactcgttttacttttttgtaaaagtaaaagtgcttttcactttctaatatactatataatttacttaccatttaaattttattgtctttccccccaccagaatgttaactcctcgatgtcatttcttttgtgcccacaagcacctagaaaaatcctggcccatactggactctcattaaacattcaatgaactgaccctaatcttagtgacctccatcatgatatatgctccctgagatctgctatagactccatacaacccccgacatggcatcacaggacaagcacaataacaaggataaagtggaatagctgcttgtgctgcagcacaatacagcaacgagacctctcttcctctggatacccctcaaagataacagctgttcaagtcacctggccagtgagtccaaacagcacaccataatgtggtacataccgcctccaaagtctatggaggtccactctagttttgttcctcctctttctcagcagtggctcagtcaagccttcttttctttttcttttttttccccagttaggttcttcccatttattttgtctccagagactctatgattaattagccaatatttctttatgtgtcattaaactcttaaaggaagactcctttctaaggaagctgtaggaatctcctggagatgatattacagtggcataatgtgaataattgtctcaagaaagaaccaagataccttgactttcttcttctttagagtgtttttgctcccttcagagagaatacctttttaggtattttctttcagactttatggtgaaaattattagtcttaaaatccttttcaagatttaccttaagatgcctattaagtacaaagaatatctttggtgcccagacctgatatccaggtgttccatggaatatcttgatccctagatctttgctacatacctatagcatttctgtctttatagcaatgtaaactaagcactataatcacttttactgcaaaatcgtaggctacatagagtctcttgaactgccttaacacagtttctgcatttttttacttttaggatttcctctctgaaacctgaatatgtaagcaatcaccagctgtatatattaaagccattgttttttctacttgatggagaccacgtgtatggctggatgaccctgtgttaaactgcatttggaccattgctcttgaccatatatttattttcacttagaattttagattgtttgtggattttggctccagtatagatttagtgctctactttttcattcatgcagtttttcatcacattgcccctgaatgattttttggaagtggaaatatgattacctgattatctcattcataactacataaaatctttctatgttctcccatcactttcaggagaagagtttgaattaattagcatgaccaaacgcttctttataatctagtactgtttatctttccaaacttttctgccagccatacaggtgcctacagtaaaaaataatatttttgtatcaaaaagatgagacatcaggccaaacatacctgtggcaagaaacacactatgatcttgggcatgtgatgatgaaggctaagcaacatcccatttttctcaagtgaaaaactatctttgaatcttggttcttgaaatgtctactagctccaaaagtggaacaagcattttctacaggaaactgtacatctgggattagtactatttagactttaaatgaagaaaagcctctgtttaagcaaaaggaaagatcaaaagtattctcagatcttttattcattcattactttcccttctggcttttttttccctgtaactttgagagatttttgaagaggaagaaggcagtaaggtcagaataaggcacacacaagggagttggaggtgaattcttgttttctcagcacttgctcttggttaggtattgggctgagggattgcacatatattattgcatcaattctatgatacacattgcttttatattttaatatctcagaagtatgtgttgaaatcaatagtattttagatttgatgaaatatgccttgcttgatctgaacaccaactttattaacaaatttatttatttttatttttttaacattaactttattttacagattaagaatctgtagatcagagagattatttgccctgtgtcacaagtggtagaaccagaattcaagcagaggtctgaattactccaaaacccattaacaaattgtagacattactttagatttgggataaatacctaatgtttattatgacaaattcaggatccaaaataatcttgactggcaacagcagcctgagacaaactaaataaaactgaaagtgatcccctctcatatcatgaccttgttggaagaagtaaatagcaatgagagagtcaggaattagacagaagtagaacaggtactggagtgtggtaggggttaaaaagtgaagagcagtgggtaaagatgagagaaaaaagtctagactctagaaataggcagtagaaacttgctatgacaggtgagggaaagtttagtatgaggtaatggggtgttttgacaggcagacagagcccaggaggtgcaaagctcagcacaggaagtacaaaaagatgcaacagaatgcctcagaaatctctttcaacagctagcaggtcataggcaacaagccaatgggaaggttttagcattagccaatgctagcaaatattttcactgtagaagcatatagttttgaaagtcagtgaagaacatcattttttctaagatggttcataggtcaaaatcctaggcctgggagatgctagaaggtgataagagaaccagcagtaacataatgccaagatgttagatgttagatgttgatgttagaactcctagtttgtagctatgctatactagaaaaggaagaagagtgcttcagtagctcctatgactccacaagagggtaaacatacaatattacagaggagggaggagttgtaagctggccatgttactgctggtcaagtaacataatattctaccctcagctgtacaagggcttagattcctttggggatggaagagcaatatgatggcttctttctgcaggaggcttcagagacaggagattgagtcaaagctgaacatgcccccaggtaaagcaatgccccatccacatggaggccatgaaccagagagaggccagggagaactcttctggaccaatgagtgaacagttacctaagtatatctctgcctcccctattctttctggagttaggccttgaaaggagagctaaagggatgatacatccccagactctgtccccatctcacaaggggctacactggcaggatgagtaaaagagcaaaggccaaatgttgagccagtggtgaggggaagcatgacatttggtatgagattggagttttaaagtggcatggaatgtagttccaaaactgaaagtgcttgcaaagtcatgggatttgcctgggatgttattgaaatgtaacagcaaagggaaactcaaaaaccatgtgaggtttgattttatgtgtcaattgactggaccactgggtgcccagatatttggttaaacattattttgggtgtgtcggtgagggtatttctgattgaaataccctctattttattttttaaaataaataacataattatgtatataatataatataaataatttttatttattttaaaatatcctatctatttcaattgataggttaagtaaagcagtttgccctcctcaatgtgcatgggcctcatttcctgttggttctgtttctctgtagaactcctgatgaatacagtatatttgaagaaagcaattcaaaaaataaaaagtcgttcttaatttatccccaacagagttgagattttgcaataaactggttacagttttgttataaagaggtattagagtactcagttgtgaatgttcaactacacctctgaatttcctgcatcacttttgtggactcattttcagtagacctagccaaacagtctttaaatgaacatattatatgttacttttgtcaaaagcacatcatattattagacaaagcaatgcaatttggccatgagactgctctcttaagacacctctgaaagtgtctcaaagcatagtcagctattagctaggaacagaatttcacatatttacttccaaactagccagtgcatggtgtgcaagagaataatggaaaagagatgcagaaacaactcgtttcaggcacagggaaggggaggctggttggaaaagaaagcagtcttaatagcacagtcattaatttgccaaattcttttctggacttgactgtgactctctgggtagtgtgttatcaatttcagcctcattacctatgcacagcaagggaaactgaggacaaatcatgtccctagacttcagcctgttataaattcccttgcatttgagatcaaataaagcctcgaacttaaattactctcttcttacatcatcatgtctgcttcatttgctccaagtttattctcccagcataaaaaataaggaaagtcattaagtacaagaagggaaatggagtggtttgtagtggtgtcagcttcccctctccagatcctctcccaagtgtgtcattagcctcagatgaaggccatctgaggctattatacttagtcattgtgtgtttaccccagcattgtagctgtcattggctaggcaagaaaaaaaagtacatctggctgggattgtaaatgacacttgataaaggtattcacagaagtgtaggcaaggatattgagatgcgcaatgactagcaacagtgggaagtggtcactactgctaggcctgaagaagcaggaggaagaaatgattaatgtggcataaaatgcagcagccacaagagctgcagtgtcaagcaggaaggagcaagaagagaggtgcactgccatctttctccttctgcctgtctgtctctttttgatgtctcctgttggctgaactcgaccaaaagtcaaagggcaaaggaacccatggtcagtcccttaggtcacaaagatggaaaatggattggagggtggggatagggagaggcaaatggagaataattagctcagttgttttgcatatttgtatgatttgtttaattatttttattagttttgtatttagtaaaagaaaatttatttatccatcaaggcctaggttctgttgcgcaattattatttattatctactgacattcctggtactgcaactgtatctgggatctttcaaacaatatttcaatatattatgctttaagtttagggagaagagacatgcacatacaaaaagtggggctggaaaagtagcttgagacgagatcattgagaacttttactggctggtgagaattttgataggcagtaagaagacattgaaggatgttgaggaagggagtgttttacttagaaatgtgttatagaaagattaagctgacaacattatagcagatgatttgatggaggagaaattgaaggcagggaaaactggggaatcagcattagcctggtaattgattatccttccaacacctctgtaaagctgttgggtgcaaattgttagtggtttactatctagtgcatgggaactgcaggaagattcaatgcactccaaaatagtagcttctaactaccaaattaaggacaaggaggaagctaggttactcctaagtgatgtcggccgatatctcaaatgcagtgacagagagggcctcatgtcatgaagtccaaggacagtgtcattagggcaggaatttactggcctccatgagtgggaaatgaaagtggtcccaggtgttcactgtgaaacaaaccccaaagttacacaatctctttctaaactgtttggaaagtacaaagaagggaggtagggagatgactccagccatgctttgggctcagtgattactgctgtttctgctgacagctcgtctctcatggagatgagccatatccttaatgatctcatttcattctgttttccaaaaagttatactcctcctagataatcaatccttttcaatatcagtgctcaccagccacccccagcccagaagatgttaatctttccatgacccctctgggacctctttcccacccttcagaaatgctatgatcttggaagaaatctgctgttagatccttgtacatatgctattctaccactagactacagttcctgagagcagagatgatatttattcattttagcactcttaacacttattacaaggcctagcattcgatagagttaaatacattttggttggatggttgcatccagctacagatggatagctgtagctatctttaaaaaagctgttttattgggttttaattgtgggatttaattatgttttgtttatagaaaaaaatcatgttctcatcgcatttactaatctgcattatttctgccaacagtatttgatagcatcagtgttcctgtcttctcagtttgaataaataaagtcaagttaccactcacttagggtatataaatatgtaggggtcccattctcacatggttctactataatggagagcttagccatgtatggcttctcaaatacaggctcaataaagataagtaactcaaaatttttctaatatgatttctcctggaacatggtgcagtggcgagggcaacatgatggcaggggttagtggcagtataggtagacatgtaatgcatgataatgtgaaggtggcatgtttctcattcagctctgttggctgctactaagaattcattgcttttactttgtgccatagaagtttcacagaggttgaaacttattagtaaatcatcacagagagcaactttatagttgatacaaatcaccttgcacattacagcattttcttacattgtggtttcagttgtgaagatgtgctatctgtttccattctgcctgtggtgttagagaacaagtcatgggaaaagttgaaatccaaagaaatgtgcaaagcacaacattatcccttcctgttgttcctggtctctacctttggattctgcaccatgtttttatgctgaaaggtgttttaatgatggctgggttgggcaatgacatgtgaagaggtgtcacttcacctggccaacacagagttcaaattatccaaataaaactactaattgggatcttcagatcaaacactgtcaagaagactattattgaggaaggattctgcatgacctttcagagaaacaagatcaaagagtagggatgaaaatgagccacattgttaacaataaaattagagagcaggaactcagcaggacttgtagttaccacatctgtaagggagttagaaatgaagcagcagagacaacatactgtgtacaattctggaaacatttatcatttctccagtttattatttttatgatttcttgacagtttttctatagtgattagtatgacaatgtataaaactagaagggcctgccaatttaccctccaaggcaacaaggaattaagggcaagaggaaaatttccaagagctggaaaaagctacttaattacaggacaaactaagtaaaaggaaagaagagggaagtatctggaggcttggaggtgatctggggctgagcagccaaaaagttcacaagattggatgtttcacttgctattgggaagaagagaggagtagctgataagaagaatgctctttgatcccctctacttcaaagcattatggatctagattaatattcagtacttctttactcaggtacttttctttaagcttcacctcccttccattagagcgagaaaacattttgtagtttctaaattgtctcttcataagttccaagggataaagtgggagacattcaggagcctggtacattagcatcctcttaatgcagtatgaagttgaggggcttttaatgtggatatcaaaactgattattgaaattgcaaagaagccttgtatgctgcttgcaagctgagatggatgatgacagtggagccttttgcattataaattagaatggctcctccctttttaagtcattgctcttttaggttgctaatttatctttttatctgtgatttatccttccttgctcacattcttaaacgtttttccctctgctgctatgttttaatagcatagacttggatttactgtgactgatttggcaaatttcaagctttagaaaggtgccttaaaactgttgctgagagctttctggagatgggtaataacattgattggaattgatagtctcttgaacaagagaagttgaaaatgttgccagggctccaaggaatgacataaagttgatatcttcatttatttgtccaatcaagacttggctatttctgtctaaagtagtaaacagacatattatttttactgctattaaaagtagcagtagcaataacaatatttatataacatatattaatatttcagttaggattttttatttcataccacataaattatctttgataaacttaaacaaaggagaatttattgaaaagattttgggagcacctacaatcattgcaaacctggagagccagccctagaaataggcaagaaccaaggcagccctagagagaaaaagcaggacccttcagagaggcttcctaaccaaaaccattggaaagtggccaccctcctaggataaagagaaattccagccatttctagcctctttgccctttagttgggatttaaattccacagatagggcatcttgtttgacctacctcggatcacatgcaagccccttgtttaggttgtgtagaccccctgattatttattatgtcagcagactttatgtaataggaaagacaattgctcaagggcatagagagatattgttaaaaatgggaattgaatgcccagcaaccaaaaaaataaatccatggtactttactttttataaaaaatgtaaaacatattcaacttaacctttgcagcaacactctgaaatatacaggcagtattaaaactgtgttatagattaggtaatttaggattaaacatatcaggtaaattctcccaaatcacatagtaattcagtgacagaataatattcaaaaccaagtgtcctcattatatattttatgtttttctttgctttctttcctattctttggggctttgatacacaaacagataagatcattgaggaacttcagttccaaaatattttctccttttatccctctggccctcccaccctctgtcatcactccttgtatctttctttgttccctttggctaatattattgaaagcttattgaatcctcttcccttaattaatttgaaaagatgaacttcaggtactgagtgtattgactttttttttttatctccatgtctgtattaattaggatgagttttggctgaatatgctggaaatcctaaaataacagttgtttaaacagaaaaaggtctattatcccacataaaagccaaggaaagccaggtctggtgtggctgggtcatcagtaacccagcctcctctgtctttttgttctaccatattagctctggcttccaatttccaagtctttttagaagttatcatgacggctggagggccagccatctggccagatgttacagattggagtaaggagtaaaagcagaaaggcaaatgagggttttctctcgctgtacgtggtcttcctaaaacatcttagagtttcttcccaacaacttctgcttatatttcattggccaggacttaatcacatggctacactagttcaagggtaaatgtaatatctctttctgaactaaggttgcttgcctttaatgacaatatttaattcttggtattgttgtgaggattaaatgaggtaatgtgtgtgcattttctaacaaaagggtttggtaaataataagcacctagtaaaagttgattcctttctactatcttcctgaggcctagcgttcagagcacccatgcagcctccagttgttcatttcccattgctttttgtagaatcttatggtctaaaggagaagataaaagttttaaactcagttaggacttcatccaaatgttaacaattatgctgactagctgtatcatcttgagcaaattattcaacctctctgatcattcgtttcctcattgttcaatgtgaataatattataaaacctatcttgtgaattgttgtaagaatgatatgatatatgtaaaaatatgctcccagtttagttcctgacataagaatagacgctcaagaaatgtgagttgttcctctagccctctctccatcacaaagatttgcagtcacttattagtaaaagcctttctccttgggaaaagaaaaattggcatcttaatggcttttcattattttttataaagaagaataaagtaaatgaataataaaagataatttaaatagttttgtttttctgcttgtgaactcagaatacttcaaatatgatagttcctcattattattttttaacgaaacgttaactctagtgtatatccattgagtgttcacacaatgtgtgccaggtgtgttccagatcatagaaattcagcaataagcaaaaaccgacaaggtttctttctttcctgaaacacattttagaggcacaaataaatgaatacataaataatatagtttcaggtagtgatgcatgtggtgaagaaaaatgcacaggaaaacgagatagagaaggatggctagtgtcatgtcagataagattctcagacagaacaccctcaaggaggtgatgtctgaactccctgcccaccacaacaaacagcctacaggaccttaaggaaaaggctgtatttaggttgattactcagtttccctgagaggccatcagaactagctccaacttgcttcatattcaattttccctcagttatcctcagtagtccaagcctcccataatcattttagtattttgctccataaggcttgacacatttcctaagataaatgaatcttccctaacctttccacagtgctgctgaaattctgaatctggaaatcatggagatttcctccatccctagactcctagctgattgttccctttccttgctccaactgacacctggctctcccttggcctctgagctacacttgcagtgttcttttttcattcccccccagccccacattcaatgcactgcagtgcatagagaaagaggagggccctccacttagagatcattttattccctacctttctcaaaaaccttgcttttttgaagtgcatgccatcagactatacacctgctacccttctttgatgtagtcagccacagatttctggatcacaccctcgaattcactgaatattgcagcatctgactcactctttgtctccgtgacaaatggtggcatcatttgtgataacttctacgtgcatgtagatgatgcattcaataccctggtcttatagttatttgctatcattttgaataaccttttcttccacatcaactaagccatctcctctcccatgtttaccttacaccttttagcttaccagtaactcaactgtctccaaaatcttgatgtcaagcatttccacttgatgcctgactcttacttcccatctttccagcgcatctctttccactgcttagatttctactccattacgacttccagctcatagactctgccacttctcgctgctccccattcccctcaacccctctcacacacattctccacttctttctttgccaagcttaaatgtaagtatttgtcattaaaattactccttcctaaacacacttaggtgcccaccaaaattctgggcaaaatttcggagctggtcagatcaattcttgcctacccagaattggctcaagtgcagcaaaaaatggctggagaaaaatagtcaagcagccgggcacagtggctcacacgtgtaatcccagaactttgggaggccgaggcaggtggatcatctgaggtcaggagttcaagaccagcctgggcaacatagtgaaaccccgtctctactaaaactaaaaaacttacgtgggcactgtggcgtgtgcctgtaatcccagctactcaggaggctgaggcaggagaattacttgagcttgggaggcagaggttgcagtgagccgagattgtgccattgcactccatcctggcagcagatcaagactctgcctcaaaaataataataataataatagtcaagcaaacaactcgagctcattctaaactaatgaccacaaatctcagatgagctgtcaatgttactctgcaattttattgcaaattctggtcaagtcactctcttagtctccagaacaactattttatgtcatctcatctctacttaaacctccaaaactatgcccgtctgtcgcattcttactgagaaaatagaagaaatcacaagagagctaatttatctgtcaccgaatctaccaatgtgttctgccttttctttggacacaattcatgaaccatatccagcatttccactgtactctggacaccacttcaccttggctcctcgaggactttgcacctgcatctgtctcctccctcaccttgatcatcaatttctctctctctctcaaacataaaaacatgacattaaagaagcctacatgggctctgcaacctcctccagttactgtgtcatgtctggcctctgcttcacagtcaagctcttttaaaagttgtttttattttctcaccccccgttctcacctcaactcacttcagccaggcttgggtctgctacgcccaaatggaaactacattctcaatattctcacttttgccaaaactcatggcacaatatcaatcctcattttactcttctcagtcgataatatttctaagaattcctgcgtttttgaagtgaactcagatatttttccacatattttataatgggagtctttgagagatatgagctccttgaccttcattaagtagatttgaatggaattcaatgaaggtctgtttctccctaggcacaggtataccagctcccatggcatttctcctgatgggctctagagcaagacgtcttatgcacagttccagccagaattcaactagatttgggctctagaaattctaaactgaatacctgggcccagtaaccagggcagggatatttgatgtttaatccagctgtgaaatctttttaaaatcaccctgtgtttaactttgtaaattatactgttctttgagtctcctgttttattttgttttcctggttattggcatttccaatttcttatttttgtttatttgcttaatggattagtaactcatcaataaattcccccttgggagaagtaacacattcattgtatgtgtcatgtttgtcttaaagaaagcctagctcattggattatttcttctgttggtgcaaacactacagacctagggcaaacacttgcttatgtgcatactgaaattcattgtcattctgcttctgtatcttcaggtcctaagccttgtggaattggtgtgagggtcaggaagtgaagttgtgcagtgcaggaattagaaattccaacagaccttttgatttgtctagcaaaatgcttttaatttttttaacttaattttttaaagctgagcatgcattcagttcaccaagaccccaacaatcactttttattatctttctatctcttgtctgaccagttttatttaaaatatctttgttgagggtcttctacaggtcaggcactgtactaggctctagagatattgcaggaacaagatagcaaggtcccaaatctcatgaagcctgcatttaatggagagatactgattaaaaatgaagcaacaaataaacaaacaagaacattccaaataatgagaaatgcaattaagttaatagaataagatgatgtggtgtgaaaagtgtgcagaaggaggtgtaactatagattgactagaccagaaaaccctcctgaggagctggcatttgctctgaggaatcaataatatgaaggagccactttgtgaagaatcagggagaggatgctaagcagagccaacagcaaggtcaaagagcctgtggcaaggaaagtttggtttgttgcaagaaaagaacagtcagtgcaaaatagaagcaagaaggaaaattgtataaaatgagatcggaaagcagagagcagattgtggaaattcttataggctatcgtaaggattttggattttattttaaatgtgatggacagctatggaagattttaaagcatgatctagtttatagtttttaaagtttactctgattactgtgggtaaaatagtttatagaatcaaagaatggaaacaagaagatcaatgactgttgaaaaaaatcctcataacagataatgatagcttgagtgaggtttggaactattaaagtgaacagaattacaaggataggacagacattggaaatagagccaacaggacttgctgatgtattaaatgcatctcgtgaaggaaagagaggaatcaaggacaattccagattttgggcttgagcaacaggctagacaagagtgtcattgattgagaagggaaggactgaatgagcaacagacttagttgggaaaagaaataattctgtttcggccatgtggcgtctaagatgcatacgagacatccatgtgtaaagttgtgtaggcactggatatatgagtcactgcatccatttacattacccctaagggcttctaagtttgtgtctttggtacagaccataggttaagaacactggttcaggagtaaaaagatctttgcttgaatccagtttttgatgcttaacagctctgtgaccttgagcaaaattcttaagttatctagacctcaggatccctatctatataatcaggttaaaatattatgtacctcataaattgattgtgaagattaaataatgatatatgcaaagtgctaaacaaagtgtccagaaaaatataaatatacaatatatattagggattatttattgaacatctactctgagatatgccttttgtatatattacttcacctagccctcccacattcctaacatcagctctcccagctaaatatcactctacaggagactgagaacagattgatacaaacacagatttattttttcacttttcaaagaaaatgtacatacctgcatggactacccctgacttaccaacataggtagcatttctaagaagctgaaatggttagctctacactgaaatccacatttttatggatatgcctatttcatatctcttctttgatgtctgtcatttcaaacttgacatgatctgatctctaccccaaacccaaatcttctgctgacttcctcatcttagttgaggacatctcgggccttttgattgcccaggtataacaccctgtaatcatcatcagtccttgtctttctcacacatgctttatgaaagctttgtatgaaatggcttcatggtaccccactctcatttcctgctactcaccccctcactcactttgctccagccacactggcctacttgctgttattcaaatacactaggcatgctcttgcttttgcacttgctgtttccttagcctgacacccaaatatcctagacattcccccagacatctgtcttgttaacctgaccacctgttcaaaattaaatctctcctggcactatttcccttcccttcctttaccccggctcattcggagagacactatactctctgaagccagtttctctggagtcaattcttctatcagtaaagatccattggtcctctgcctgctgactcagccccatgacatgcattagggttgtctctagctgcaatataagaaatcatgcaactttgggaggccaaggcgggcggatcacgaggtcaggagatcaagaccatcctggctaacacagtgaaaccccatctctactaaaaatacaaaaaattagccagacatggtggtgggcgcctgtagtcccagctattcaggaggctgaggcaggagaatggcatgaacccgggaggcggagcttgcagtgagctgagctgagatcgcgccactgcactccagcctgggcgacagagcaagactccgttaaaaaaaaaaaaaaaaacatgctatagtgactaaacagggctttatttgtctcatgcaacaagaagttcaagggtagatagtctaaggcctgacacgactcagtgtgtcaccaaagattcggaatcctcttatcttctttttctaccatccttgtgcttatcctcaaagccatactattgctactgattttttatgagttccctatttcaggcagaaaaaacgaggaaagggtaaaaagcaaaagataaagagttctcctatgttgtaaagtctgtcttctatagtctgcactgcctgaaattgcttatttttcagctatttttaacctataaaatggcaatttcataaggtctgacctaatattggggaaggaacatcttccccagaggcttttttttgagatggagtcttgctctgtcgcccaggctggagtgcagtggctcgatattggctcactgctagctctgcctcctgggttcacgccattctcctgcctcaggctcctgagtagctaggattacaggcgcccaccaccatgcccggctaattttttttgtatttttagcagagatggggtttcaccgtgttagccaggatggtcttgatctcctgacctcgtgatccgcccgcctcggcctcccaaagtgctgggattacaggcgtgagccaccatgcccggccccccagaggcttctacctgcatctcattggccagaactatgccacttggacactctcagcctcaggcagagcaggacataaagattgtgtgagcctttaaggcagccacttcagtgtttgccatccacaattttgttcgttttgagttaccaatcttccatgaacttattcagcttcctggctttgagccatccccctcagagcctctgttacaaggcagccaccactgtttcatagacatgggggttcataactcttcactaaatccctactccacacctcagcacatgagaacttttgggtctcttatgtgatatctacagattttgaggaattacatttcagagactggggcagtaatgatagaatctcgggccttctgtctaaataaaccatactgtcatttccattctaccacattatcctgtgctcgtgtggctaaaaaaaaaaccctgcagagctgaacttctaaatctttatacatattatttaatctaatcctcacagcaagcttttagctctctcttctattgctattttatacacgaggaaactaaatctcagagaggttaaatccaaggccctttagctagcaaatgacagagcttctattcaaactcaggtctgcctcaagccaaagcctcgtcctgatccatttcattaaattactaccaagtattacagatctttcctagggcaatcattttcttctatataggactcctggagtcactctgagtatttctaatgaggctgacaacaaagggaagcttggaagtttctaagcagtcacttccacagagttgcttaatttgccctaattcctggtttttgcagcccctgtcctaggctcttgctcacatatggacttgaatttgtggaaaggtcaaaaatgatattctagatggagagatagtcttggagtacaaagaacataagcagaaatgagtaaataaagctctaggagagcgtgtgatccagctcaattaaaggttagataagccatggtggcacataagctttgaaggtagagttcaaatcataccattaggattttgactgccaggcagaagagtttgatctttcttctgttggcaatgatgatgtattggaggttttgacacaggagagttaaattatactttgtgtttacaactttaaaaaatcaaaaaatttaaaaattgccttgaatgcaaagcaaacataataatcctaccatagggattccaaggcaaatttgaaagttttgtgacattttctgttatcatttctgttttccaagatagcaatgagatttaatttgcgcatcacaaagaccgttagcctttaaacagacaaaacagaaaattcttacgtctaaattcaatttttgttgtaagaacaaaagttgctcctactaacgttaaataacaaatgaccggaagcatcttgcaattcaatgttaaaatagttcctgaccaggtgcagtgtggctcacgcctgtaatcccagcactttgggaaaccaaggagggcagatcacgaggtcaggagtttgagaccagcctggccaacatggtgaaaccctgcttccactcaaaatacaaaaattagcggggcacagtggcatgtgctactcaggaggctgagggccagagaattgcttgaacccaggaggcggaggttgcagtgagccgagattgcaccactgcactccagcctgggtgacagagcgagaatctgtctaaaaaaaaaaaaaaaaaaaattcctaaattgtaaaaccagcatggcaaacgaaatgaatattatggcttccttgtctagagtagaatggtcatgattcagaatataattttttaaaacatattgaagaatattgaataatttaagtgactcattaataacattgagaagctacatgcaataaactcagctagaccatttaaggtactggtttttatttgtccaagtaatgtcacattattgaggtggcacagaaaacagtaatccatctgtgagtcagaaatatgtgagtcagcaacactgtgtgaagagccctctgtccttttgattactcaaactgatgttttgattcaactgagtaatttaccagtaagttaagataattgagtattaaaaaggaaatccatgttgagagaattggttgtgaaaagatgaagtgaggaaatggagttattgacagagctgagaagtattcagggatgtctgtatcaaataaatcaacccttcaaatgacttgttttactgttggtgattgagtgagtccaaggacaggcttctaagagaagcagttaaaagaaatgctttgcaaatgtgtttcctcaaatacttaaatttgaaggcagtaactattcaaaggatggatttgcaaaatagcaatgccttctttaaaaacaggtgtttaaattggtattgatatctgaagaggaaaatgaactcacattggttaaaaagtaaagacttctctattcacttcaaaacactggtcttatttccctcttttgaaaggcttcctatggaaagaaaaatcaaagcctatcacggtgattcaggagttttatactccatgtgtgggtcaagtgtgagtgaggtaaaggattgtgacagttcctcaaggatactgtcatagtgaggccatctcccaaacctgactggttccaccttaatttggctttggggaatgaaattggggactgtccagcccgatgaagggcaagctaagacctgctcataggcatttggtttaaattacaagaagattaaatttctaaaaataatggcaaagaacagcaaagcctggagactgagctttaatagaatcatcataccatttatttttggaatgttgacgtttctgaaactcctcagatgcaagatcaatgctaagtagttttatagaaattggatgcattttccataagattaccagcagagcagagggcagtgatatgcaaaagcagtgcagagacagtgcctcaaatacactgcaaagctctgtccgggcgcctctcctgaagcacctggcatcagcactacattttcagacctttatctgttaaaatgtttttttgcccttttggggatatacagtgtgctagccttgttgtctagctgcattggtcattcatcatagtttttctgtagttctcattgttttaaacacattagggaaggattggtaaatagatagtattctatatcatgataaaagcttgataaaatcacctaggaaatcggtgtagaaaaagaaaagagcgtaaagctgagcccaggggccctccaacatttagaattggaaaaaaagttagagtttggaaaaagacctaggaagccaagaatataggagaaaaaccaggacaagacataccttgaaagtcaaatgaaggataacttgggtcaaatattcctgatatttgagaaagatagtgactaagaattgaccattggtttggacaagacgtaggccactgatgatcttgaccagagggatttattatgaagtgttgcgggccaaatcctgattctagtgtgttgagaagaaaataagtgttaaggaaatggagacagcaataaagacaacttgttagaaagttttgtttaaaaagaattgccggaaaatgaggcaatggatgcaggggtgcatggaataaccacaagtctttttaaaacacgtatttataaggtacaaatgacatgccaaaaatgcacttcttaaagtgtacaattcagacacatatacatttatgaagctatcattacattgaagataataaatatagccatcaaacccaaaagtttccctttgcaacccctcccacctctccctgacaccacccctttccccccaggaaactacctatcttctttctgtcaccatagattgattttattttctagaattctatataaatggaattatacattatgtactctatttatcagacttatttcactcagcataattagtttaggattcatccatgttacggcagttgtcagtagtgcattcttatttattgctaagtggtattccactgtatgggtatatcacaatttgtttatccattcacctgttacatttggattgtttccagttttttttttactatgccaatgctacaatgaatattctgcatagactattatatcatctattaataaaaatcattttatgtcttccttttcagtgtatttgctttgatatcattgtctttccttattgcactgggtaaaacctccagtaaaatgttgagtagaagcggaaagaacaggcattcgtacctggttcctaattttatagagaaataattcagtcttttatcttaaaggataatgtcagctgaaagttttcacagatgccgtttacctggttgatatgtaaatatatgtgtgtgtgtgtgtgtgtataaaggatggatgttgaactttatcaaatgcttttttcttcacctaattatgtgattacatgtatgttggtttgtttttcagtctgttagcatggagaactacattgatttttttttgtctgttataacaaccttgtattccttggatacaccctacttaatcataaggtgtcatcctcttcatatgttattagatttgatttgatataattttgttaagaattgttccatgtgtgtttatggtgatattattcttttgggtgattgtctttgatttttatatgggagaaaccctgaccttatacagtgagttgagaaatattccctcctcttcaattttctaaaatgatgtgtagagtcagtataattttttaaatatttcgggcagaagtcaccagtgaagttatctgggcatgcagttttctttatggaaatgttttaaactttaaaattcaatttctgtaatagatacagacctattcacattatttctttcttcttgagtgaattttgatagatggtgttttacaaggaattcgtccacttcattgaagttgtcaaatgtactggcataattattattattatttttgagacggagtcttgctctgtcgccaagactggagtgcaatggcaggatgttggctcactgcaacctctgcctcccgggttcaagtgattctcccgcttcagcctcccatgtagctgggactacaggtgcatgccactatatctagctaatttttgtgtttttagtagagacagggtttcactatgttagccaggctggtctcaaacgcctgacctcaggtgatccgcctggctcagccttccaaagtgctgggattacaggcatgagccaccgtgcccagcctggtataattttttttatgattctttattatttttatagtatctttagagtctatcctgttatctcctctctcattctttcagtaacttgtatctcttctttttttttcctggtaagtctgactagaggtttgtcaattttattgattactcaaaacctgttttggcttcactgatctctctctccctctctcttttatttccgctctatctttattttttcccttctgcttcctttgtgatttatttgctttttcttgagctagaaacggaagtcattttttctatttttttaataaaggtattttagagctgtagatttccctgaacatgctgctttagctgcatcctacaaattttaacatataatgttttcgttgtcattcagttcaaaatacttttctcttttcattgtatctttagctcatgagttgtttagactgtatttagtttacaaatgcctggggctttaccaaaaatctttctggttttgatttctagtttaattccgctctgatcagaagacaaactttgtatgacttcaaatttttttgatgttttgagacttgttttatagactagaacgtcagctattttggtgacgtttcacgtgcacttgaaaaaatgtctatctttgtcaattagttaaattgatgatgttgttcaagtcttctatatccttactgggtttctgtctatttgttccatcaattattgaggctataattgtgtagttttctatttcttttttcagttttatcaatttttgccttatgtagtttgaaactctattaataggtacagaaatatttagaattgttatattctcaagaactgactcttttatcattatgaaatcatcctttttattcctggtaatattcttaactctggaatctacttattcttttattaatatagacattctagatttctgatgattagtgttatcatagtttatcttttttcattcttttccttttaacctatttgtgtctttatatttaaagtgatctattataagccacatgtagtcaggtcatgcttttttaatccatcttgaaaatgtcttccttttaaatgtgatgtttagaccatttacatttgaaggtaatattgccatggtcaggcttaaatctaccatgttgctatttgttttctatttgtcttatccattctgttgaaaaaaaatgtttagacaagttaaatttaacagagtttaactgagcaaaggattttttcagaatcgggcagccctcagatcagaacaggttcagagagcagcattccacagtatgggcagcagcatttattaatagaaaacagtaatgtacagaaacagcttgattagcatgattacttggccatccaaaattgaagcttggctgctgtgattggctgagctcagctatttgttacataagtataagcctaagttaagctttcagttaatttatatcgtaaaaagtacagaggaagtttcaggctaaatttagcggttcattatatgctttttcctctttttcttctcttttttggatagttgttttatgcttccatttcctttgttagcttattatatatatctcttcatttttaaaattttaatagttactttaggatttagagtataaatttttagtttatcacagtctaccttcaagcaatattttaccgctttatctagctgtaagaatcttcagaatacccttctatttcccccttctttgcctttgtactcttgtcatatagtttacttctacatatgtcatgaacttcacagtagattgttattatgtgtgcttttcaatcacttatcttttaaagagattttaataagaagaaaaaaaatgtttattcctttgtatagaaccagatttccatctggtatcattttccttctgcttgaaggatttcctttaacatttcttgtactttgggtttgctggagatgatgaattccttcaactttcatatgtttgatgaaaatctttttactagttattttttgtttgtgggtttgtttgtttttgatacaaaactttacagcttgattgtttgctcatgcaaaatacaaaacgatgatgcaggagagagtaaatgtatgcagaagggtagaccatgagtaggtgagggaggacagggttcaggacagaggagttggcttctgataaaatcacagaaatgtatccatagcagcaagaagaaagacagaacagttgtttacacgtgtgagttgattgattcattaatggatccaaccaaactggttttaaatccacgatgtaccatttaatagctaagtggttgtcagcaagttatttaagccttttaaatttgaattttcacgtctataaaaacaagttccttccttcctcagaaggtgattagagcaatgaaatgaggtaatatataccaaatgtacagcacatgacctggcacattgtgcccactcaatacctgtgagaaaaaaatatatagcttttctatgctttactgcctaagtacaagtggaaagattctgaaatatcatttttccacttctactttctctgcttccctttctctcacccctcctcccttcccaaaagaacatatttaaaatccaaatgccaggctgtctgcaggtgcagtgttcaagactgataacatttggaggccagatgttaactgacataaacactattaagtgctatgtagaccggaggctgaggcattgatttccaattttatgattattatttgaatttacagcaaaccataatgccattccttccacgtctctacctccaccaaaaagacaatatatggcctattcattttcaagagaatataaattgtttttaaaaatatgaagttcttgaaatattaagttatgctgtttcacaaacctggaactgaaaatgcacccttgatgtgcacctcaacacctccctagagctctgcttgaaaggtcaaagacttgtgaaatttgatctgaaaaccagtctcattttctgaaataaatgcagagtaataacgacaaaaatgcttcaaacctgggacaagtttttacatcaacttatgttttaaatctcagtttccttagacttgatgtgggagctggcccaatgacaataaataaatatcctttctctgagtaaagaaatactttgtaaaaacaagttgggtctgctgtgaaccatggaggttattgttggtgtttaatgcgctcacacagtcaattattctttcattaatctattgagcagacatttgttcataacctgcagtatgtcccaggaaagtgccaggcactagttagtataccgttaagtgcaacagatggccctcgtggggcttagagttgtgtgagagaggaaggcaataaaaggggaaaaaaaagacaaataaatatagcaaaaagctttaataggtactgtgaagggaacttacttaaataatgggttaaggaaggaattttttagtagatgacttaaactaaagcttaaagaatgagaagaaggcagccatccagagagtagaggagaaaacaaacagaaagaccaacatttattcattcattcactcgacaaatatttatgtagcactttctaccagccagggactgttcaaagcaaagcagatataccaggaaggaaaacacacacgtgcaaaattgctgaattgagaaaggatttggcatgttctggaacagaaaggaagcttctgaggctgaatcacactgagcagggcacagtgtggtattggatgaggatggggggtgtggcaagggctagattatgtgaaaatttgtgatccatggcaaggagtttggattttatcctacaggcagtgacatgattttattattgtgttaaaagattgctcttgctatgtggagaaggtttggagggtggagttgggcacagtggaagtggagagatccatggggtggctattccagttcagatgagagattttaatgccgtggtggaaacagagatacacaaaacagtacagtttctgtatagagtggataggacctgttggtcaactgaaaaggagaaaggaggttgggaagggaagtaaaatcatggatgattctggtttgtacaactgagtagatggtggttccatttactactatgagggagaatgagtgagtaggtggttgggagcagggaatgaaaactaagggggcggggaagggtgggataaagattaaactaaagtttcctagccaagtcttgaagaattaaatcaattcaaaaatttaattcattatgtcagtggttactatggccccatcactggaatatacaaacagaagctaaatgaccatttatctgcaatattttagatacaggtttcaaacatatatctagaactgattttcaaatggtaggtgagaacttacaaaagaaagcagcaatttcttgaagccatcactactttagtaaaaactagttttcccagatcaatctcatttccctaattgatcttgagctattggaagctggcaccatatttcttaataaaaatcttatttaattaatagattgtcttattggcagagatacttaacttatgaattaaagtatttatattttactaatagagcatttaacgatctcttatgataactttaaaaaatggagaatgtagcctggaaaatattgagcgagtagaatattttgtatactcaaagtgcaccctggggcagaatcaatgcaaagccacccccctccctggccctttataatgtctacatacagaaaacattcccacacaaaattaatctcttttagagaacttttcctttccttagaattacagttttataaaaagtggtaattactattaaatgttgtaacatcgtttaggggttttagtagataaaagtttgaaatcgagtctgtgaaatttcagccataattagaaaacataaagaaagacatactttgtaattcctattatttctgagaaacattttttacctggaaagggatagacagagcattttgtaagcttgctagaaataatgctcctatatttatgaagagggaatgtttacatatggtcttgttctgcttgtgcattaaatagtatgacataggaacaacacaatgggaaattaccaaagaatcacactaaaatatactcctaagcatttgaaacaaaacttttaaaaaatgatacttaacaatttcagtagagaaactaagtgttgatattcttttttcattgttcacccatttcttgatagtgaaatgtttacaacccaaaaaaaggatctcaatcaataagtaaaataatttgcaaaatatatttatcatcaaaaattaaagctttctaacaaaggaacattgagaagtacttgtggcatttccatctctcaccacatcaataccaaagaatgtgaatgatttttgctgtgtgtggtcattgggcctctcctttgggcttagagccctgtggaaggcattctagcccctccctgcaggtggtatttggtagcacatccccagttcttctttatggagctaacttttaggggttgattagggtacagggcaagagatgactgagtatcaccgtatcacccacagtcagtcttgttgaagttcgtctgtgctgtctgtggtgggtatcaaggggagtttataaaaattccttggtcccaaaccattcatttgttcatttgtttattcatcagacgtgataggcatggcccttagcactggggttaaaaataagaaaaagattcaaacctaagtatcatctgactcaattctttaaagtatagaaatgaggataggaaggaactaaaggacaagttttaccactacctgtatctgatcttaactcaaatgacaccgcctgagaaaggtggatggtgtttcccggtgaagtgcaatagacaacctacatggctggatagagcggacctgctgactacccaaactaaagaaacattattccctttgtctctatcacactactatgttttattttcttcatggtatttctcactatctgaaactatcttactttcctatttgttgtctatctttccctcagggaccttgttccatacactgctgtattctcaggcggagaacagtgccttgtttcatagtgggtgcttgctaaatatttgttgagtaaatgaatgctcatcaccattaacataaaaccacacttgataaccaacattttttctatctccaaaatgtctgcaagttgtctaatcttgtacctcagggatctacctcacaacttcatttctgtgggaaaagactgaggtgtggggggcaggatacagggagcccctgtttcatttcagttagttcccccacagagctggaagtagaagccggatccctagaatctcagagctcttcagcattcctgtgctacctctggttgagcctttctgtggagaaagcagttttggattactgccatgaatgtaattttcaaaggccctggaagaagagaaagcaatggaagctgcttctagacttcagatgagctgaacatcagagttcgtcttcctagtctgtggaagggaagtcatagactttggaactgaattcttatggcataactgtaatattctgctgtagctgtggccagaggagttctgcctgccttcgtctaggtcgtgggctctatattaggctggctgtgtttttcacagcttagtccttcattagaaattaggactggctgcagcctgcagtgactaattatagaaagatgggtcattgtcattgtgggtaaaaacacatgtgcctgttaaacttctctgtctatagggatcagatagtacatttgaagtgatagccaatataatcacttaagtaaatggataaatatttatttgtttttattaaaatgatagacaagcatttgaagacattcatttctttttctttttttttctttttgtgagactgagtctcactctgttgctcagctgggagtgcagtggcgcatcttgtctcactgcaatctccgccttccagatgcaagtgattctcctgcctcagcctcccgatacagttagtttctgagtacaaccgaggagaatattttccaatagaaattttaagaaacacagcattttttcatgactatgcctacccccacaacacacacactctatacagaaacatacaccttattatagaaacattttctgtaagcaaaaactcctaggacggagttcctgggatactgaagggagaatgcggaaagaagaacctagtgactccctttaagagctccactgaggtcatcacctgccagaggttttaatccaaatgaaactggctttttgtcagatgcgagaaaaaactataagatctttgcattcatttaacaaatatttgttatgtgccttttggtgtgatactcagctctaggccctgggactacaaaactaaatgaaggcttcattcctgcttcaaggaggtcaccatctggtggagtgagagagataagtaaacacaagagtatagtctagcatggccggttctggaatcaaggagtctaaggggacatctgaggggtcagggcacagattgtaaggtgtaatgaaaagaggtcacaccttagcagttttcaaatgaagcttcacatttttcaaatgaagcttcacattttggatcctccattttctcttctttgaaatgaggcaaaaagaattagcctgccagagttgttataattcaatgatataaaagagactcagtgagtaatttctaagaaagaaaagcaaaattgagacagcaagagctctctcccaaaaggcagtgaaccattctgcggacctgtggatttgaatctcttttgtggagtttgcagtctttctagcgggttatttgttagaataagccaaagaggttcacctagagaatgactaagttgcgaaagaaaaatctcctctggttcagaaatgaattattcctaggatgttgcttcatgagtctttgttacagaaattggagtttgtgcaagtaattggggatcaggaaacaaccaccctggggacaattgcaggcaattctgcgaccacctggcttaacttgaattctaggaagtagagcttctcttaggttaatcaaaggtttcatggtacaccttgtggctcttttctttatccctgatttttcctcccaggcttatgaataaggcttcagttatgtttctccctccaaaattgccagcagccccacctgctgggcttggaggctggggcctgcagcctaaggacagtgtggcagtctgctgccatctgctggctcacgtgtcaccagctcagggctggctttgcaaggattccccaggaatagaaaccaccaggagaataactgtgggccagagaacgttcctgctcatattgaaaaatgaagagatgagaagatggcagacacaagctggtataagaaggcttttctcctcctgcgagtttgtgtaaagatgtgaccatctcaaacagctaagccagtgatatttctatgcagatttgttttgctcagggagaacatagcagtgctttctaaaaaatgtatcttattttatttagatcactgtctcacaaggccgaacaaataaattaatgacacatctctgtagattcatttaaaggaaacagcagaaacacaaggcagtggggtctgaggtgggtatagggaagcagaaagaggggagggattggagaaacatttcgcagtaagttatagtatattttagttggttctgtccacattttttgaagacctactgtttacaaggctctgacccaggtgcctgggatacaagaatgagtaatacttagtaatactgagtcccttctggcttggagataacaatgtattggggagcagtaaataaatagagaattaaaacagaattgcaagtactgtgataaagtactatggtaaaggaatctaggagagcacagaggaggagcatgtgtcaaaatcaaactggactgcagtgtcagagagcgcatactctgggagatggcatgaactgaattttgaagatactagctcaatggagactgtaatgggaaagacattccagttatgggaagcaccacttctcatacagcccatcacccaccatcactgcctggaagagctgagaacactagatacaatgcaagagaaggctgttaaaacattaggtctcagatgagcaattgattcagtccagggatattggcagaggcagggagaagaaggcagatccaagtgagcaggcaacataaataatcttgaagatcagagagcagggcttggcagggtctttggacccagggaaaaggccactttcaatgccgtgtatatatgggcaaccccttccaggcaggtataagtcacaatcaaatattcagaaacttgtgagtaacttcctgtcttaatctatctgaaacttctgtgtgacctcatttaaatgttgaagtagctacaagctcaaagttatcaactgcaacattattcagaattgcaaatatgaagagtgaaagtagagaaaatgcttgagaaaattgtgatacagcaactgaatgaagcagctcatggaaaatgctaattctgaaaactgtagcacataacaaatacttgtgaaaaaaatcaagatccaaacctgcaggagaaaaaatattcagaagagaaaaaaataaactgctagtaatgatgttgttcttttctctattgtctacgttttatataatattcttatatttcttttataatgatttttttaaaatataaagcagcctaaaggtgaaatatgtgtcctgatgaaggcagaggcaaaaattaccctaaacaaataatggccctatttatgtgtttgtttctgctactgtagattccattttcttcctaattgtatttcagtttgtgtggtatattcattttgcttattaagcctgtcctcagccttccctttgcccacacccctcctcactccctggatctgtgggacgtattgtgatgtctgcccgctaattttgctgtgactggggctggtgtctggttggtgattcatgtttgttccaaagttgtacatctgtgttggttgctttgaagcagtgccccagggaatatgaaaggccatttgtctccctaagactgcttctttgcatcagagacttcttccctggcttcgtttaaattccagcaagctctcctgagtttaagtagggtaagaaggaaagaaaacaaaagcaaacaggggcatcatggagagatcattggagtcagggtctaaccccagtttacctggcataagtgaacttcttggattctaatactagggacagaatgcctatgacactcattttaagggtaatgctttgtggacttaccctctgcccactaggaatgcctttagcaaaaaagaaggcagaatgagccttggtggaaaccctgaatggaaagagttctaagagctcggtgggcatacccacttggcacctgctctaagattttagcacagatacacacagcagtggtattcataatatttaatgactggcactgcatgagcactgatgaattaatggacacaggcacagtgcttccagacaccaatcctttagttactggatcaccaagaagtccagctgaccctggagggcctggggcagtggatggatgctaacagttttaaaagtatgttagtgttttaatatccagaaaggttgcacagatacataccagatgaataacaacataaatacatgaaatttctaaactcatgcccaccattaagttttgtgtaatcccctcttcactttttaagaacctacctactttgcccttaaaaatagttcagagcccatgacctactgtttctaggggtttgggtggcacacaaaaaagcccttatccacagaggggctttttattttgctcaactacgatagatctcacccaagggaagtttgcaagtcgctttattatatttttgcttgctgcaatgtatgtggctaacaacgtagctctgcctccaggcaggctggcaagcaggctgctagtatgagtgattgtccacctgcctgtctgcctgcagtctttgaaaggcagccccatcccagaccattagcctactgagaaaattcatctacagtaccttgaaagaccaaacatattggattgttatagcttttctttggccttttacccagacattatcattttctgcttcttatcagacacctggagtttgtgggttgtctaaaagcagcttctgtgaatggtctctggggaagccttataaccctgccttctgtcatttcttctcctcatgtttcaaggaaacctacagcttcagggtaatttgctgcctccccgttttcattcaagagagcagccaaggttgcttatagtctaactggctctttatgtaccaaattacttttggttgaattcagagactaaagaggaatttcactcagttatctattgggccattctggagttctgtcattaggaaagtctgaggttgtaaagaaattagttgcaagacatgagtcttccaattctgctctgcaagttactagcctatgactctgagaaaggtatttacatcttgctaagcctcatttacctcaaatgtagagtaggatcattttatatacttcacagggttgttaggagtaaatggaataatgtattgggaagcactttgtaaagtgaagaaatataagcaaaatccacccaaagtgagctggttgtaagaactagtgaaaggaaagaaccaagaatgtagacataaatcatggccgctgaattggtatacaggaaattcactgttgtggtctaatttgaaaaaaggagcatcctcagccccatatcttttgttcaccatctctctgcaaagctttagctggggagcagtgagagttctggagaaatactagggaagaggattactgtcaatttgaggctaagagagattgtgtgtgcaggaaaaaatgcatatgtaatgataaaggagaatgtgaaaagggcacagtgcccagggaaataccaggagcgtggatacagaaaacaagagacaaaatctctactgctcccgtctgtgtgttcattgatcagagcatgttcaaataattctgggcttgagggcacctttctagagtgacgaagaccgataggaaacctcatgacactcctctgtgggagccagtgaatgcatcctcccccagagacaaagctctgcagccttggagagtaatttggtgttagcagattaattaagtcattttctgtggttaaatttgcagatgaatattaaatctcaggctgggcctcccatctaataacccagtggaggttgtcaggataacactttgttcctgaaacatttagaaatacgtgtattgtatatttaatgagactgtgatatttattcatgacaggaagaagtcttccagacaggaagactttactcatgtgatagttcagggtctgacacctagagctgtgctgaatgccccctctaaagttgcttattatcaccaagttgttgtatgcctggcaccaacgccgaatttgtccaagttactcatgtcactgaaaggccatggagtttgctcctgggttcaaattctggctccattatttgctaatggtgggcatgggtaaataactgaacttcagtgcgactcagtttcctatacataacatgaaaataataatgactgcaactctaagctgtgttgaggatgaaaactttccatagtacatacagttttatgtaaaatgcttagtgtatagtacctgccacacgttggttctcagtgtatactatgtgtcctcctccatggttatcatgtgaccagagtttcccactttctctttaagctttgatgtggaaaatggcccttccccaggtcggagtccactggatccccaggccagctcttccgctgggctggtacttcacgccacctttcctgggcacagccagcgcagagagtcatttctctacagatcagacagcgactatgacttgtcaccaaaggcgatgtcgagaaactcttctcttccaagcgagcagtaagtacaagctctgtctggcttccagtttcacatttacctcatctctacccaggtcacagtggcagcaacaacaattccccattaatctatggtaaggatgaaggaagaaaatgaatatgagcaggggtgacgtgatgaccattttaaggacattaatgctctatagcatgcggaatatgtagctggggtctccaagggttttggaaaacctagacacagtgtttactttacatcttttactgataccttaaaaaaattattttgcttcatttcctgaactgttgagtcatttatggcatgagaaccttaacactttttatacatcacacttgaaatttcagctgtgtgtgcagttttcatgaggctccagcaaagaggaaaaatggtgattggttatatgcatgctgtctcagtagcctttgcttggtgactttaataagatgtcattcagacacatgcctgtgtcccttctctgaaactttaacacaatgcccacttgttgcctggctccttggtgagacacaacacactccaccgccctgtaaagcactgctgatatttttgttttgccgctattaattgtaaatctctaaattttatttaaagaacaagatctaggttgtgtcacccatttattaaatttccaaaaccaaataaaattggattctggaattcatgccttaaaaggtttctgggcacagatacaattgtttttatattatatgtcataaaagtatcagtagctccctaaggtctccagtttggaaaattccactctgttctcttctgctattggaagggaagtcaaaaatttcaccctctggtgaaagggggaattttgaagctaccagcaaaaaaatattccttgaggcatttctgccagcacattttaatagacgcacccctgccctaaaatatctcaatcattgtgtgggcccaaattcatttttcagtcatttggcaaaatttactgattctctcctttgtgccacacattgtgtcaatctctggtgataaaagacaaacaaaacagtgtaaaaatcacagatgagttaaaagcatatctcattctcaaaaaatgtgcatgctgtcagggaggttacagctaaataagaaagataagaggaacacacacatacaaacataacagagtgaaaggaaataacatttaatgagcacttcccatggagccgagctcatgttcttatgttatctctgttaatctgtcaggtaggtgtctttattatccccactccatagatgatgaaactgggactctgagagattgagaaacttgcccctatcccatgactgtgtatcatgctgtgtcccatgatgtggctaagcctgaccatattaaaaacttttggaatctttccatccatgttcttcaaattgcaaagtggcatctctaccactaggtagaaaacaaatgactgcagagtagaggtgtccaaggctgcaggagaggtaggtagccagcaactttgctgtagatcttgtagaacccaaggcatttctgacaaaagtttgaatgggggtctttgaatgcaaagatattgggaattctttccttcaccaagataaacacctttctaggcttcatcatggaagaccgtaggtcatgtggtgagctcaaagtaattagagcttaattcacatagtattttacaggtgcaagattagctttgaaatcttgtcattccccaaaaactaattccctggctaagagctctccagactcaagccaaacggcaggaagaatctcaaggtcattcagagtcgccccagaaaactctactgcacttccagattaaatcttgtgtttcattatttggaatcaaaaggttgtagaaatgttaaatttgaagagaccttaaagatcacaatccaactgaatctacggcagtcaaaaaagaggtgtagttctaaatgacaccgcatccagcatccctgttactggtagtttactgtcctttcaattttactggccagtaaaattccccaccacccgccccaccccctgcccccagtaactttagaacctaaattttccaactttaaatttaggcaagtaaaaattatatatgtaaattatttaatatcattctcactttttaaagataaggacttagataaaaagtagtatgggcacaatttcataataaaaagcagcctttcccaagaaaacaaggttggcaacataataccaccctatcaaaaatactgataacaggatatattaaaatctttgtgtgaatgaaaatagcacaagattttgttttccaaatatttcagtaccacagaaaaaaacttttatatatttgtcagttttggaattatatttcacaacacgctgagaagtagagtttgaataatattaagcttcttctagtaatttagttttaagttggcaaatccagtttcacataaatatctgaatctgaactaaagtaatgctcttaaagctatttcatatgattattaactctttaagatgaatcgaaacagaggaacagcagctccccacacttcccgcccctttttttgccttctacccatagatccaggaagcaagaagggtgctaatagaccaagagtctagatgtgaaggccactgggtgggggctgccggatgttccctgctcacagacctcatacccagcacagagctgtcatgaattttttatgaatggtggaaaactttgcataattctactgcattaaatcctagtaataaaggaaacactagcttttaaatttttctcatctgaattttttcagaagagtaacagaaaattatagtcaggggagagtgagtgaaaagatattaagagtaaaaatgtgaacaagaaaaattaaaagtagctttaactttgagcaacaaaggagaggatcagaataaggctttatagtgaagtaaagcaagatcaccattgggtcccaaaaggcaatttcagatgctttcctagatgtggcaatagtttgctggtttctgttcagttcctgtgttgtagtcatcccaaacgtaatgccttcgtatactgaggtacagattgcctcatgggaacataaagtactggaaactagtaaggccagttttactgctgaaaactgtggcaggaaccaccatggacagaatggagttttgattatccacctgcaaagccacaggaaaggaaactccatgttttttttcatttggtcatcccattttgcaaagccttacacagacaagaagcttttgaaagccaccatttacgtgtggactaagtagtctctagagagagcctactcattttcaagggaaatgagacctaagaaccaagaggaaaagcagaaataataatccacttaaatttaaaacctgtttattgatggactagcaaaaagtgcagtgtggtttctaagacttgagttagacttacaccatcacacttactagcaccatggcttttaagacattgaatctcttttattgtctctaaattatctgtaagtaaaagcacacatttattgagtattttctgtatgctatctgttaaaatactttacatatgttaattcatttaatctccatatccccaatgtggtaggtactataactttcttgttttaatgatgaggatattagggcacagagaagttaagtgacttctccaataaatgggaacaagacgaacccaagaagtctaggaggtaaactatatggatatccagtatgtaaacagactctaagtgaggctgaaaaatacaaaataatgctattaatttctgttctgcctacctttccagctgttaggaggatcatattcattctctcttttaataagtatgtaaatttaggaactttgtgaacaaataagacagtttctgtgtcttcaagggtacggaaacattagaagtcaataggcaattttagcagtttcagataagggcaggcatagagagctatgcactggtttgaaaggtctggccaggcaggaaagcagcctactctgaggaggttacagctcagctagaggagtcaggcaggcagaggaagtgcaggagaggccaggtgctaactaatcctccagttagtgtgggagcattttggagaaccacagctcagtgtggttgatccagaggatatgagaggatgaggaagtggtgaaaaacaagactggaaaagtgagcaggaacctcatcatgaagggcctatgttaaggaattggcctttatgttgcaagtggagagttactaagcagataaacatataatgcaacattttaaaaaaatagctctgattgcagtatagaaaatggtttaaagggtagggaagcttaaaggctagtactcaaacctacagagccaaacaggaggctgccatgatattcatgtaaaagaggatggggatttatattacagatgatctagtgagcagttagtacatatttgcaagtcaggatcagcaggagttagtgtttaattgaaggataaggaagagggaggtttcaggcttggtcgagaagataggtggttgcactatttcctgggatcaggagcattctcttactacatgaaataatgtacatgaaagtgctttgtaaactgtaaatataacataaatatgagtcctcttgattgcaatggacagacatgaattaagattaaagaagctctcatcagctggaaatacagacatgcaaccctttaattatggatgcccttcaacttacaatgtcccaaaaagcccatcctaagttgaaaatgcatttaacacacctaacctaccaaacattacagcttaacctaacctaccttaaatgtgctcagaacacttacattagtgtacagttgggcaaatcatccaaagcaaagcctattttataataaagtgttcgatatctcatgtaattgaatactgtactgaaagtgaaaaacaggaaggttgtatgggtactcaaagtatagtttctgctgaatgcatatggcttttgcgccattgtgaactcaaaaattgtaaattgggcagggcgtggtggcctgtaatcccagcactttgggaggctaaggtgggtggatcgcttgagtttgagaccagcctggacaacgtggcgaagccctgtctctacaaaaaatacaaaaacttagctaggagtagtggtgcgtgcttgtggtcccagctcctcaggaggctgagatagcaggatcacttgagccagagaggtggaggttgcaataagctaagattgtgccactgcactccagtctaggtaatagagtgagactctgtctccaaaaaataaataaataaataaaataagtaaaataatcgttaagttgaggaccatccatataaaaataaagatacctactggtattgataataactataactcaataactaatctgcttttatgtgctaagcactgttatcaagagttgtacatatgtaataattaatttaattttcacagaaccctgtttgacaggtaaaaatgttgagacatggagaggttacctaatgtcgcatagctagtaataatgcagctgagaaacaaaccaattcactttggctccaaaatctgtgctgttaaccactatagtatatatctctccatatgacagacaaaaattaaggaaattacaagttaatttctgtgtgtagtgagaaaacagagaaaggtggaatgaattaataaaattcagagtgtggcagtgaaaggcagtatttctgctttctagaaaatcattttattgtttagagcagacctacatacactcaattctatgactcagtactaagactggagtgctcatttcgttattctacaaatttgtaatgtgctggctttgtcactagatgttgctcttgcaatgcaatgattctgaatatctggacttgctcctgagaggcattgccttctccaggggtttgggaaagtaagaagtgtatcagttttcataatcaatcaaatgttttataatttctatgccatttgattcttaactagtgatttatcaaattatgatttttaaaaatttataatagttccataaataatctggttgcactctaagagaagttttttgttttgttttgtttcttttctgttactttctataaattatctgatagattctctaatagcaattttctaacatacagcattagctttggcagctcaaattgtttaagggaaccaatgctgggcatctgtaaaatccattttttgcttctgaatgttctgttctcctaaacttcaaaagttccataatgataaagtcatgttgacattatgccctattaatgtttctttatctccctttaatctttggattgtacagttttaataactcctccaactcattcaacagtacatcagctcaaggtaccacctatgcatgagatttacttatattaattagcttttattagatactagactctggaaatccgggagtcatagaagatgcacttaaatctaaatccgttatcttgtcccaaattcatcctgttgtcttatgaacaatgtgaacttcacatcagaaatcagaacacttcacttgactagcctaaaaaaaaagaaagaaagaagaaaagcaagaaagcaagaaagaaggaaagaaaagaatcagaacaaaccacaagatcttcacccatctcaaagttcatcttgggaaaaaaggttggaaagggtcagtttctgatacagttcaccacactccatttatcacaactgctcctgtcttgattattttttcttttttgtatctctccaagaaccctgaggctcttcctttggctccctatttatatgtacccccacctcatggggccacttcctgccatggccttaactatccctacttttgtaggaaacccctaaatctatagctcgaattcccatatctcagtcttcctgctcgatgtctccacccggatacaaatcagtacctttaagttcaacgtgtaccttaaaaactcagtgactaccttaaactcccccaacaggaggggaaactcctcatttccttatttctactcacggcttcactgttttctcagatatccattttttaaattgaaaattatatttctttatgaccccttatccaattaaatgtcaagttctgcaaaacctctgggctctcttcaagttgtctcattctgtccctttcttgacattacctattggttctcatcagaatgggtgcaatttctaactattctttccaggtctgtccccactccaatctatccctccacatccaaggcattttactttctaaaacacttttctgttggcccatctcactttccatctcactaaaaaccttccctggctcctttctctctcctctctctttttcttttcttttctcttttcttttcttttctttcattctttttttcttttctttttttctctttctttctttctctttctttctttttgagacaaagtgtcactcttattgcccaggctggagtgcaatagtgcgatcatggctcactgcaacctctgcctcctgggttcaagcaattctcctgcctcagcctcccaagtagctaggattacaggcatgtaccaccacacccagctaattttgtatttttttttagtagagacagggttcctccatgttgatcagactggtctcaaactcccaacctcaggtgatccgcctgcctcggcctcccaaagtgctgggattacaggcataagccaccacgcccagcctgggtgatttctttctatggagttaagtactgactctataatctttgtctggactgtccataatatgagcgtgggaggccttctatccttattctctacaaatgtctatagctaatatgctctgctccacccaaatagccatcaaacatcttaataagcgtgttcagtattttcccatttcagtacctttgttcctgccatttctcttcattggcagcatctaccatccctgactttttaaatccttcaaagttcctctgaaacactgctcactcaatcaagactttcctactttctctaacctgtaattgtcatgtttcctttggacttcatgaagtatacccattgtttttaattctcattctgtattaaaatgtctattacagtttttaaaatattttttgtttcccctactttgtttcagttttggagttcatggatattttgtatgatttgatatgtcaactatgcagcaagtcataaaataggaagcataggctgggtgtagtggtttacacctgtaactccagcacttgggaggccaaagtgggccgattgcttgagcccagggcttgagagcagcctgggcaacatggcaaaactctgcctctacagaaaaatacaaaaataaataaataaaatagctgcgtgtggtgttgtgtgcctgtagtcccagctactccagagtctgaggtgggaggattgcttgagcctggaggcagaagttgcggtgagctgagatcactccactacactccagcctgggtgacaaagctagaccctgtctcaaaacaaaacaaaataatgacaacaacagcaaaaatgaagcatagtgtttaaaagcacagatttttgaaaccaaacagtctaaattcttacacttggaatcagtctcagttcttctacttactaggtatgtgctagttaactgctctgtggatcgatgtcatttatataatagcaatattaagagtacctgacacacagccctgttacaataattaaatgagataatacatgtaaactgcttaccacaagacctggcagacaacagtagtgacacaaataatgcttactccttgtcagtattctttttattgtcactgtacagagtgggcacagaagacacttgccagattaaattgaagtttggaggtttctagctgaagaaaaaggtggaaataaaagtatcatattaaataagatgtcaagttaaaagcctatgacagaggagaggcccaaatggatgcatgtgttgttcgactctggagccccaggcctcgtgtggtgcctggtacagggcacatgattaataattattggttgcactaatgtagttaacaaagaaggtgccatatttgtgtgacaatgatgaggacagggaaggtaggccagacactgagggaagttcactgttactaatttctgtgctgctatgatgattcacactgtaatagcaaagtggcctgattttgtgactgtagctcaaaccaacatgtcttctagtaccttcaatagagagtttgctgaatgtgggtttaagtagatttctcaaagtatgtgccagagagacagtgtgcacttctgaaaacacatttttgactcttcctaaatacagatttacataacactaggtacagcttaatctgttctttgggacaaaatggagtgacaatggtatgattatggcaggttcagccatacactcctattaaaagcttttccttaggtactttaagaaaaagttatattacaaacaaaaagtaatgggattcccagacagaaatctgtgtttaaatggcattaaagctgtggttcgaatcaacaaaagccaggaaatccaaagttaacctttatccagactgttataccagtttttccaactgtgtgtgtccctgtgagcagccctccctttgaatttcctggctctggcaaccaaaatccacaagtcgctttgaattacagtactctggatctgttatttaatgggaatatatcctgaggatatatgcttacttgcaaatgcttttatgtgtagtcactgtaaattcaggagtcatgaatctagtactaattttttcctttcaagctcttggaataccctttcgtgccaaattgtgagtcctgtcttatatccaggtagaagaacttgtataacatttgtgttgttaacactgataaaatttaatattatagcttatatgtcacagttataattcaagtaaatttctaaaggttctttttttctcttttcaccagacacggcgatgacttgattgtaactccttttgcccaggtatgtattatgctggccctggcttgctttcactgtcgctggtttctaagtctgaacctggccatttgtcttcttttgtccttaaccgtttaaaacatttttcttctaggtccttgccagcttgcgaagtgtgagaaacaacttcactatactgacaaaccttcatggtacatctaacaagtaaggattgacttttttgtggagtttgaatccctaacataaaggcaaaaaatattgagcagcatttaaaaaaatacaactattacatggaaaattgtcctctaagctaagttaatatacacaataaaatttgaaaacaggatggagcaccatagtattttagaactcatacaacactataagtaacctagtctgggtcttattcgtctttgtacccataagactcagtaccaagtagaaattcacaaatgaaagaacaaaaggaagatttaattttcgttgacttttacatttactactttgaccagtaactgccataaattctattaaaattctttttgaataagttattaatgaattcagatattcaaacttaaaattaaatgtagcaaaaagttcaagttcaatttgcctaatttttgattgtctataaacaagttcatgcagtttaatgaataagagtgggattatcttctcctccaccttcaattaattatatgatcttggcatttaaattaatgttgctgatccttgatctccgtatctataaaatgaagggtttgaactttatattccttgcagtaacactttctccaaaatcatttcgaatctatgagcttaagctaagttctattcggttcactcttctgcatgttttaaaacagtatcacaaaggtcagagagtcatagaacccgtgatcctggaatgagaggactggaggaggcctttgagaccattgattctcttgtttagtagaaacctaagctctcaagaatccagtgacttgctaacaaccccctccccccgcataagttagagacacagcagggccaaaacctgtatctaatttttcagccagtgttcactacagagtatcctatatctccagtctttgtgaagttatttttcagtcctttactttgctttcacacacattttcatagaatagtttcattaaaagtgggagtaaaccctgctttgaatgtttgctttttctttcactgttttatgactaggctttcttgtgagatgactctgtatactctgatcaaacttccatgtgagtgatctttctcacatgttgtatgactgtgtcaccctccagcttgaggcatttcagtggtccagtgttatcattaagataaagtttaaatgctggtgcttggcactcaagacaaattaatttgattgatagttgcttgggtttatatgtagtgcaatgtatatgaaatctagaggcttgtctcagcctcttttgggtagaactccatttatttatttatttatgtatttacttatctatttatccatccaactagtatttatttagtacataccatccattcatacatggatatatgcatttaacaaataactactgggcacccccatcagtaccaggcactggtaatataatagtgaccagagcagacaagtcctctcctcttttagggcttacattctaatacaaaatgctgtaggatgcagtgtaaacaatcagaccaggtctctagccacatggaattatgttcaataatcatggtctgttgttctctgcatactctcttctctatcctaattatggacttactgttctttcttcctaaaatgtctgtttccacttgccagtgtctgcttggccaaatcctgattgtctatgtcccatctctagtatcaccttcactgagatgctttccctgacctcaccaaacctggctgagtggccctcatttggatccagagtactctgaaaaccttatcactatctttatggatctctgcccaccactagactgtgtgccctttaggagtaagaattgggtttagtttttcttgaattcccaagaatagcagaatgcctgacatacagtttgtgcttcataaaaattcatcacatatatgaacttctgaataaataattgttggaggaaagaccaccaattatttagaaaattatatttgcaggattgattccttctctatgtttttttctttgtagaatatggcctctggcttcatagcccatttctacccccttgaaaatgatgcacttgggcaagctaattactctctctatatctcagttttctaatgtgtaaaatagggttgttatgaggattaaatgaattgatatttgcaaagcacttaaaacagcatcttgcacaaagtaggtgctcaataaatgtgagctattataatggatcgttacatttctcttgctgaatccagaagtggtgtaacactttggggttttcatatctgttgtcagcttagatcaccataaatgatattcatggtattgaacaaataaaggtattgttacccccactctatggataaggaaacaaaacttagggagaataaatgacttgggcaagaacgtacagcttccagtgggcaacagagttttccttgaaacctgtaatcctgactgtcactgcagtgctcttttcatttgccaaacctgttaagtcttctgggttataggaagaagtccctggaaggctttggaacagaaagacatttaggaagaacttatggaatagatgaaggtcagaaagcctgaagacagagacagtagctaaaacaatattttcaggaattaaacatgagggtatagctctaaaccagaatgatggagatggcaatggggaggaagggattaatatggacacattttaaaggcttcttaagcatggctggactgagaaccactacattgcacagcactagggagaaggcggggtgggtggtggtgttctcattcttatttgttagcatgggtttgaaggttttttacctctgttagtagtatcagaacattcagcccaaccctgctgattaataagctgtgccaactgaaacaactttctcaataatcaggcctttccaaacccttgagggttttggtccttgtgaacttttaggaaccaagtaccccaagaccataattgccatagcacagctgaagcacagcccttcccacactctggctgaggactacccttcaaatcacggccccttgtgtcacccttggtccaaagcaagccatgcttatcacaaaaagcaggcctccagtggtaagatagttgtatctaatgatctttctcaaattcatacccatgtgtacagagttgatcctgttactgattgcaagtactaccttgtcaccaacaaaaattcaagagagggcacatttaccactagagcttcaccaaagggagttgagagtggtgcagtctagctcagactcagtcctgaataatggatttcagacatcagggagctgaaatcaatgaaatcaattagccatctctggagcagtctggcaggggcaggctggaaaactgagtgtccatttaatgcactccattttatttctagatagtgaataccttcaaacaactaaagaaaagccaagagaaggaactgaagacaataatgtttggcaggaatggatacaacatacagaaagcatacccccacccgaacacacacacagacacacacacaaacactcacacatatacacagagttatcttaacagctgaaactgtagaattcatggaactcagatattcctttctgatatacttgacttcagatccagggtgccactccctgccttgaatgtagcatttaagcaataattgtgtcctaggagtggttttcatgagacatctggttagtgtggtttattgtaggaaaaggaactcccacatagaactatacttctcataagtcaagatttcttttatcttttggctctttgctgtgcataaaagcagtccattgtctgcttgtgctttaccactcaaagggtggaaatctcaaagttcctgttgaggtggtttccttgcaccttcatgaaatatcccattgagggatgcttgattggacctgtatttcttggctgcaaattaaaacctacacttcctttgtcccaggagttaattttgaaaatatggctttcatttagagttgttaattcagataagcgttcttaaagcacttgctgactttaaacagactgctggagtaatcaggtgcgcaagtgagtgtgcccaccattcagcagtctgatagccaggggatggagctgggagcaaataggtgtcatttatcaatcgactctgtcatcaacatcatgaatgtcacctgtggctatcaggaaataatgtaacttctttgtattaacattcttccaaagcataatttaatgaacatgtatgtaatcttcaggaaagaactaataaccacttaatttttttagtgcatatctatccaaaatgtcttttattgctgtatgtactttggcatgtgaattaaattaactgaggatcataaaatgtttagcgttcagagctggaatgaacctagccaaatttcctcagatgaagtgaagcaacataggtaaaactcctcacacaggactcagtacgttgtaaatcaccagtaaatgttagttgctgcctgctcttctcaagtgaggaagaaactaggaggttccgtgaattgcccaagggctatacagtgggaaggtgccagagccaggattaggattcctgtcttcttagtcacagtccagttctgtctccactgtgctattcagggctggaaagtatgaactgctatggccatattatcttccctatttatatcaccatcttcagcaatcagccacgtaacttcttatgattcttccataagttacggactttggaaactgagcaaccaataccactttcctctggcattccttacaattttctgtctggcattctcatgccctacaagcaatcatgtggcttgcagaagtcatttattcattgaaaatgtattgagcctcttctttgcaccaggtctcatgaataattgacaaaccaaataaacatggtccctgcctttccaaagcttccacacagagatgcttatctgaattgacaactctaaataaagccatattttcaaaattaacttctgagacaaaagaatttgtatagtatgagtaatttccaagaagtcattgagagaattaggcactgtgatttgacacgctataaagaaagtagagatttctgacatttggggtctcctagttcagtttcttctttcacaaaagtcttctttggaactcaggaaaaggtgtaagataaaattattaaaatgcattattaatccagtgcgtatgtgttgagtacctccatcatagcaaatattatgccagatccctgtgttacagtggtgcacaatgttcaatcattgcttaaatttctcatagatgagttgaagagaaagacaggaaaatgggaaatacaatatagaatgagcaatgcagtggttcagtaagcacaggaaactacagaacacaggtgagggccactcacagagggaaggctcctctgaggaggtgatgcctgagcagagtcctaggacatatgaaagagctagccacataaagagaagaaaagtatccaactgagcaaaatgtgtgcaaaggcacagcaacaaaagagagtgctgtgttcgaggaacagcaagtggcatatagaaccaagactgtatgtgaaaaggaaaccagataaaatattcatatagagtatttggttctcaaatcactttcacatcagtgggttattcaatctacattctattaacattttggagttcctactatttgccaggcaatatggcgggacctgaagagtatgtaagcaaagagatcagaactggatcctgccatcaacaggtcacagattaccagtggagataatatgtgccaatatggactgtaacatgaagaaatgaccctaaaggtacaaataaagcaccatgagagattaaagagaccattcttggctaagaggatggcatcctttggagaaggtttgatgggtaacttaaccttaagttaaccttaacttaacctttgatgggtagattgtttggtgtggagacagcttccttgacaggggaatgaatggcctgaataatggcaggaaaggggcagcacatattcaaggaaaaagaagtgttcaagtttggccttggcaagtgtgagtcagctctgtccctcattcattcactcttctattcaataagtatttactgaatgcttgtcatatgaaggaccatcctgggtgccagggatcaagcggtaaacaagttgttccctgctcacataatgtttacatttaatcaaaggaactatgtattgaacactaactagacagagcctatttaagctataattttaaagtgctacaaaagagaagtacaggatgcatgagagcacagagccagtcagtggtctgagatgaaatgtcaggcaatgaggaattatgagagataagctgggaaaaggatgttggggctagagagcaaagactttgaatgccaggctaaggattttggaatttaatctcttaattttcctgaaaaacagccctcagtattagtgcaggtgttatcagcatatagtatagtggaaagagcatgcactttgggttcagaaagacttagctttgaattctggctgtgccaattataaatcatgtgtcagtatgtttcttaaactctctgagcttcagttttcttatccttaaaatggggtgataatactcccagtggaagctaagaaatacctagcacagcctagcagagaaaagcaatcactatatgataatttcccttctcttgtcacatgtgaaaatttcataccactgagagtttaaaagtaccctgcctaagatcacccagctagtaaattaatggtagatgtggaccctgtctatagactacggctactaggtatgggtacctacaagctagattgtccctaaaggaccagagattaattcagagcagtagaaaaacctagggaattaattctgtggccacaccagtaggaagactcttctttagcaacaacgatgcaggctgttctttgtcatttagaatttggcttcgttctcacgcttgcctgtgcaagagaatgcaaaaagaagtgaaaactacagattcccaggcctcatctcggatatactgaaatagactcttcagggttggaaaaagaaatttaatagctccccagatgagtcggctgcgtatccatgtttgagaaccactggactagagtctcactctcttgctcattgcaaatgtcctgttactccttagtggagcagagaatccttaatgccagtgtttctgaaaatgtggtcctcagaccagcagcatcagcaccacttgggaactttttataagggcaaacttttaagcccatcccaggcctactgaatcagcaactctgggggtagggcccagcagtgtgtctgaataagacttccaggtgattctgatgcaccctaaaatttgagagccccgctcaatagtattcctgagaagttttccagcagtgcatcaggaaacaggagagtctggtagaagttctgcaaaacatgagaagaagggtaagagcagtgaaattgaaaggttaggggcagagaaaggaaaagaaacaagaaaaaaggaggagccccagtactatgggaacatgggtttgcttgtttcatttaacccctgacatcagcaggcttgttatgatgtagaatgacgtcccagttcctccatgaaaattctgttccctaagtaaagcaagctggatgactgttcccagtggttgtgtgaccttggcaagtgacttcacctctctaggtctctgtctcctgaggtacaaaaattaggggcctgaagtgattgatcgccaagggttcctctggctataactttttacagcactgcccaaaggaattgagattcactctggcatttcgagtgatgcctgagcaagtgactctttttctcagggcttcttggaacagcaaaacttaaaacagggggctggtttgggacctggagtaaacaacttccttcctggagagtctgagcatcctgaggacttgcagagggaaattccaggccatctggatgtgagagaattgcagtcatctacccgggttacaggagcttgccttccggagatggcattatgtcactacatagttcattatgacctggaaaagtcctcagtaaccatgagggtggggtgtcgggggtggaatgggcagttttgatacacagactcagtccttcttttctctgtctccacaggaggtccccagctgctagtcagcctcctgtctccagagtcaacccacaaggtaggccatgtcataaggtctatctagatgtttcaagatagaataataaacatgcctcttattcagaactgttttttagaacaatagtgttgtttgcatattgtggctctcaaaagtatgtctcttggtgacttttttctaaggtacactggagcattacttcactctattaaaaccacattaaaagcagtactaaataatttgcccattgtatgtgcaggctttcagaatatgataaacatggggtaatgctgcctcttccccaaagaggagcaggagacagagttgtattgacagtgcagcttgacctcagcttgctggccccaataaactccaggagagctaacatcgaagacctaaggtgctccacgttcgcctgagggcccctgcggatatgttagtggtttccctcttaatgtcaactatagattccacttgaatctacatcctttccaggtgtgaaaccaaaggctctttccaggtcacgaatcatttcttttggagggcatccaactttgttcctcaacggtgttttgttttgttttgttttttgttttttaagaacctaacctctcatctttcaggacagtgcatccacttttcttggtgtgttgagagctgcagagaggaagggccaccttgaaggaacaccatggagttctgttggaactgaaattcttcttcacacaaaatgcaaccagttctatgatatttgttaaagtccaaataatgttttctcctaaatctgttccctactaatgtagcagtagatttgagaaaaaccacaggagaaacaattaagatgaactcacactgagatcacctaatgcctgacacctaacgatgcctcacatgcttttctatttccagcagcgcttcatacttaaaatctttctctcttggttgttgtgttttctttctggtatcctgatcataagtataacggaagtattacaaaagcttagcttctaaaagaagggaacaaaagcagcagattctattggctcattggcttctgaagtatttgtggtgcatgctttttaaaatatttttataaaagaaagattgagaacgagaaaaaaaagtgaaagaaagatactaagtaaaggtgagtttactctagagcctcgtaatatgaaatataaagaagtaaacagtactctatggacttcaaaaacctggtgtgctgcatgtactatttcttttagaacttttataaaaagaaacaaaataggatgttttaacatataactcgtgttacatacttggagatcgaaggaggtagttttgaaactccaatcatttcatcatattggcctaccagtgaggcaatgttgctcacatttctgttagccaaatttacatcaatttgattatttagactatgttttctttttcttgtaataaatactgacaaacattaggagaatatgtacaatttatggttctataaattagctcattaaccaaagatgtggttggaaagatccttttgtgattattggcacagcaactacagcttgacaactagggattcttttgataaagtcttctcaaacaatggagcaaagaaatgacagtaccactcaggcaatttgtttccttctgtctctgtggcaaactacaaaaatcttggcttttcactgggaagagaatgtagtgataccaattactacgtaattacgggtttcaaaatctccttaacgtttagccacggttagaaaaggaaggaggagacacacatcccttgttttgttcttattatcagcttaaataagtcaggcagatttttcctgttattttaatatttatcagcatatgacaaagaggtgtgtttaaatagaaactttaaaggggaatgaaaaataactggctcagagcaaacagaattgagaactggagtgctgcttcaaaatatgatttttcatgatagtaagatcaggtttttatttctcagtactgaagttgaattcatgtatttcaattgaaatctaagataaaaggtacaagaaatctacatcaatttaaacagatttagcaacaacctagtttgctcagaaagcctgacttagataactgtattcttgtattggagcaattcagagagagagagagaaataccaaatcttaaaatgctttattattttgaacatataaatgagaaaaaatgcaatttattttaaaagctaattgtcagaaaccatggtaaattggtacatttacttttacaaattgattattaactgaaatattaaatggatacatcaaaggaaagctctccatttgaaatacccctcttcggccaggcatggtggctcatgcctgtaatcccaacactttgggaggccaaagcggacggatcacgaggtcaggagttcaagaccagcctgaccaatatggtgaaaccccatctctactaaaactacaaaaattagctgggtgtggtggcacgtgcctgttgtcccagctactcgggaggctgaggcaggagaatctcttgaacctgggaggcggaggttgcagtgagccgagatcgcaccactgaactcaagcccaggtgacagagcaagactccatctcaaaaaaaaaaaaaaaaaaaaaaaagaaagaaaaagaaaataaagaaagaaataccagaaatacccttcttctcactatccagccaaggttcttatcagctctcatggctcaatgcaaatgtccttactttgcaaagacatcttatttttttttaagttggcataattgctccttttttgtgctatggcaacaatttaattctctgatatactttaattcaaggcttcttgtgtgtctctcccattggagataaagctcttgaagacagggactgtgccttatctatctttttattactcatggtgctttcgcatagttattttcacatagtaagaacacagtaagtgttgaattgaccgggaaaactacataaaatttggggactttatgtgaagtaaaatacatataaaataaacttttaataatgagccaatatttttatctctattgctatgaaaattattcaaattgtgttttttcactgttaacaattagttattgcactgaagttaatagaggtttgaagcacactctataactgcttatatatgttagtgtgttcgtataggttttgaacaaaaagagtgaaatctaagaagttggcatttagcactttgaataagaaagccagagtagagcaatggagaatttcaagcccagaaagaacaacgaggaagccatatgctcccaggttgaggagaaagacgcagtaaatcctcctaggggtgtcgaaaatgccaatgttgtagtttaatgagcatctgaatttgtttcacattttgcctttcacaagcataaattccaggctctccctacatggtgctcaaggattgaaacagaaaggaaaaaatagaaaaagaaagaaaactccaaaataaggcaggaactcgaattctgtcacctgtacatattcacaacagaaaattgaagtaattctcaggatttcaggtcccaaaactatttgcaacaggaaaatggggtgcatgcatacacatgtgtgtgtgataattgtcgccttttttccattccatcctatcctttgctcttcaatagtaatcacacatatgtcatgacagtaagaatttactgaaaagataaattatcaagtgttcgctgtctttacaaaatgatttttttgctttatagaaggattggagaagcatccttttaatggctagcacatccgagtcatgtaaatgtgacttgatgtaaaataatatgtatcatgtatacaatattttagcagccaatttgatacataaggtggggtgctctctactaaatttctttttctaaaatttatcagtaaatttactgagcaggaacattaccactggtaacagatcagatgttatgaaaaacaccacagaagtctatgggtcactggaaatgacagcaaaccatagcaccaagatgactagggaatcactttgaggacttcaagccagattgctgcagatactaatgatatcaaagcctggatatccatagccttgatttatggtgattttcaacaccagtcaattagaatgcatttcaagaaaagactgtgttcagagaaatcgtatgagacatttcttttaatatgtgtctaggccattctggggaggaattggctttttaccaactgataaaacagaagaagaggctttctccttggaaacctatttctccatacaggttctgcccatagctttacttgattatgactatccctccggaggttcatgtgggtgtaccagatgcagggtctcttcaagtagtggacaagagggtcagtgagttatcttcgattttaaggaattcagaaagtcatgacattgattccgttctcattctttgccagaactttcaggacctgtgatgagacagggtctatatgtgcatgggtaaagggctctctgagaaccacagcaatagcctgagagcagtgctgcatcagatgactggaaatgaggcccagcacaagcagaacctttgcttggtttctacattaagcaagaactgtcaggcaggattacaacacttacggacaaataggaataaaatcaatcttgtgaccaaaggctctgaccagtcatgataaaggaaagattagagggaattataagaaaaaagaaaaaggaaagaaaagagataaaaaagaatggaaaaagaaaaagtcagaaatatcaaactatgttttcttccttattctgaattctgtgtgctgaattaatggaataattgccttaattactcgccttcagcgtttagacagcctgcatataaaatgatagcaaaaatgcaccagaaaagccccagttattttgagaataattttccaaatggttgttttgtaataattgcttttgtctaaaatagccctcttatgaaagtttaccccagagcatcaacactgagctgtttatattgatttgcagttatttcatacatatctaaaattaagtattggtactcgcaaaaacattaatacctcagctaaagtgcaaacgttaaaatgtttcccttaagcagatattgtcaaatataacaccctgcttattatggttatttcactagttcaaaattaatttgcaaatttagcataaatatttcttctctttgaatgaaaccgaggaggcctcatctaagttctcactagctgcctgaacagttgagtccgttccgtgttgactccacttcacatttttgtactgctgagaaacaacatccacccaccctccccttgaaagttggaatcatgcatgttagtaagtatttcagttatgctattgacgtcaatggagtcattaaatagattgctggccctcccagaggcaaatcgctgccagggacctagatacagacacgttttttacaaagacaaccatcaggttttgctatagcagtaagccagagaaagggaaaagtttatactgtagcagacctatctccaaacacagtttctttctttcttttgcattttagttccggcctttctttctctttggttacagtaggctcaagcagatacccagatactgttgcctgaatgttttgtgtgcaaaagcatctcctgtaattgagaccatgaagggaggtaccccacttttaaaaatgagtctcacattttgctctacacagcctatcttgatgttgacttggttgcataaattatttaggcaaatcactattgtctgccagtaaggtcgtgtttgatatatagttccctgaataaacagtctcctccaaacacacacacacttttgtactttctgccatccctgcgtggcatgtcgctgcatcccctcatctatgaatcaacctttttgcagctagcactgtgctgtagcatcagggatctgcagcaaagggtggaggaggaagctgggaagaaagcttcacttctctcagctgcctcatctgcagcgctcccacaggaggctgtccacgtgcctgtgtcctcccaaaccctagctgctgcctgcctcgagcctggtcatgcagctcccaggcatggcaggcagagccctttaggaaacatgtgcctctttctgggcattcttgacagctctatttacctgcacagccccaggagtcagagccagagattcgcctcacacatctggactcttccacctccaggatcgaagttagggagacatcttgagcagacagatttcttcaaatctggttgtcagaaactatcccattggttttagaacccatttctctcttcagtcctgtaccttcactccctggagacccccaacccccattacttatcagtaagtttgtatataaatgccagacatctgactacctctggtaaccccttttggttcatctggagacccaaattcattcacctacacaactgtccctttttctgtctttctgactttgagtagcatcttcatcatccacccttttatctccctcttcacctaccacagccaactcctttagtctttttctctaatctttttccttttctcccccacttcctctgcctttgtttattgttccatcatcctgtacctaaagcattgtggtggtcctccaacttgttattattgtcctcattctttccccactctaaaccagcttccattctggtactagaattctttttttttttttttttttttttttggagggacggagtctcactctgtcatcaggctggagtgcaatggcgcacaatcttggctcactgcaacctcagcctcccgggttcaagcgattttcctgcctcagcctcccatgtaactgggactacaggaccccaccaccgtgcccagctaattttttgtatttttagtagagacagggtttcaccatgttggccaagatggtctcaatctcttgaccttgtgatccgcccacctcagcctcccaaagtagaactattcttataaaccccagttatggttacattattttcttctttagctatactttgccttcaagataagacctaaatgtctcaccaggcatgcaaaagcctttagaattttgctctctttctttgtcctcatctcccactttacgctgccacccccctgcacaactgatggctgaagtgcactgaatatacatccctgaaatacaccaggatcttcttgctttcctgctttcatatatgctgtttcttctacctggttgccttttctccaaaatatcatttacatattcagctcagggattatttttcacattgtcactgtgaacaaattctatatatcatctgattcttggattcaggattaaaataaatatatagtctcaattcagggcctgggccctgatatatactatgtgcataggaaatactacttcctttacccatttccttctggaaagtgcattttaacccttcatcttcttgatataccttctgcaactcacccaaaattactgttaattattatctcaaaatctctgttattacacttgtcatactgtattgtaattatttcattttttcccattctaaactaaaagcatcccaagttcaaatactaatcctctttttctatatcctcaatttataacataaagcccgggacatagcaaatgctcaataaatgtttatggactgaacaaatagggatgaaataatgcccatgcctgaaccagataagattagaaaggaagtgaggctcatgttcagctttgttaaggcttactgaaatatctgctagctctcaggacatgtgcatagtgctgacatcccttgctaatcttgacaacgtgtgactttcaaggcacttgaagtgaactctttgttatccatcacttcaggaagaagtggcagtgttaaaagaaatggaagaaaaacaactaaatgaatttttatcatactatattgttctcttagtgcctggcattgtgcttgccacaaagtaggcactcaagtagcatattgaatggaattggtttgagaacccagttaatccttcagagaagttacttctctgagactcacttttcttgtctgaaaaatgggcattttttttttttttgagatagagtttcactcttgttgcccaggctagagagcaatggtacaatctcagctcactgcaacctctgcctgccaggttcaagtgagtctcctgcctcagcctcccaagtagctgggattacaggtatgcgtcacaacacccagctaatttttttttttttttatatatttttagtagagaaggagtttcaccatgttggtcaggctggtctcgaactcctgatctcaggtgatccaccctcctcggcctcccaaagtgctgggattacaggcatgagccactgcgcccagctgaaaatgggcattttaatattctatatgttaagattgttgtaagggctaaatgagaaaagctttatatagtgattaagagtgaagactctggagtcagactgcctctttcaaattccagccacaccactttgtgaccttgggacaaattgcttaacctctctgtgtcctaattgcctcgtctccaaaattaggatggaaattgtgtgttttggttgtaaggattaaatatgttaacatgtataaagcatgtagaaagtcccagtgttagtattggtgttattagtgttatataacatgactcagatagtactcagcacatagcaaaccaccaatgtgtggtagctaagatcccagccttctggtatcagtagagaaccacaacagaaagccctgttgagctctttctagaaggttctggtctactttgcttccataataataccatctgaagggagtaatttttgaagtttaagactttttttttcctcctgagactatagaaatcttgttatatagaaatagttttagagctgaaggtagagttctccagctcatacatgggaaagctgaaaagtcaggagggagaatggagctgacaccaaatataaagggacacccctaaatacagctttttctcttaaaagcagagtgcaaaaaaagattgtcaaattacttaggacttctggtaaaccaaatcttagttaactgaaagccctgtcttgcataagcctgacaggatgccactttatatgatagcatcattacagcttgtacagcacatcaaagttgtattgaaatacatgtttcagggttggtacacacctattcaggcataggtgttacaacccaggaagcttagcagggagtagcgctaggagctggtgcaaagcctccctttgcagagaggacaaaacccactagcagagtctgcaggaagggaagaggattggcccttttgggaaaaactttacaccctctccaattactgctgagaaggaaaaagcaacctcatacccatcttaacccattctcctctctttattggaagggagggagataaaaaaggaggttggagttagcctagagaagaatgaatatggaagtttgctaagagacaaggaaggaagaggaccaccgaagttcctttttctgcctcctgcttccccaagtgggtatgatcctgggggcagggtgaattctgcttgcttgcttctgatcaaccccgagccagcacattatgaagttgcctccagaactgttctcggaagccaggagcatttcagggaacagcctttcacccaagaggagggaaacaaagcagggactgtcccctcaaaatagagaacaggcaacagaactcactggatctttttcttggtttattgtcttgacttcctcccagtcagagctgttgacaagcaccaaaagcgaccccttggagttttctgtatttttcctaccccctgtctggctgtgtccacagagtaagctgggaccatggcgattatccagcttatttgaatcttacaggcagccaggtcagataatgctattttctctctgccccctcagttgtatttggggcttcaaatttctagggtctagtctggctagcactgctggtctaataaactagataatgtccaaagcccacatgtgtgcctctgatttcaggaaaggtaaggggctagtgcttattccatttctggtatgtgccaggcacagtgctagcccctttgaatatatcacgtcacctaattctccaaactaaacttctttgcgtatattattgcccctatttcacatatttggaaaaagaagattcaggaagtatgtggggctcactcaagaccacaaagttagtgatagaatcagaactgaaagctagatctgtatttcttgaaaacccatgctctttcctctgcagtctaaaccacactgtctctgcctccatcccactgtaaacctcagatgttatagcttatcaagaaggggatggggaaaatgtcatagcaagaaagcgaagtgactggactaccaacaaccttaataattattacatactagaggactttctttaatttctttctcatctatccattttattgtaagtagtaagcaaaggtgtaagtcttgagagaaatacatctcacacgtccattattcattcattaatgtatttaataaacgtgttaaattcatactgtatacaaggcactgtgttagccactgaggatgctgtgatgaagagaatgtattcagaccctgatctcatagatcttacggcccaggaaataatgcataaataaattcatgactatacacttgataattgtaatgaaggaaagtacagaatgctatgatattggctcactttttcacctgtaaaaatgggaataatactagtacttaccattagggttgcggcaatatctaaatgcgttattttacgtaaagcatttagaacacgcctggcacccagtagtatttagtgtttaactattatgatcattagttttatcactatttatcattatcatcattatcattagtctagtgttattattgttatcattctggggcctaaagtagattagaagataggaaagaactctataaataaatgactttaaactggagtcctgaacactgagtagctggggtagatcgaggggcggtggtcctgagagagtaaccaacacctcagagatgccacagccagagaactgggcactttgaacaacagtaagggacgcagccacagagactgagagatgccaggttaagcagaacatttgtaagtcatggtagacatgtagattttactgcaaattcagttgggagccattaaaagattttgagaaacagattgacgtgatctgatatgcattctatttattttattttattttattatttatttatttattttttgtttttgagacagagtcttgctctgttgtccaggctggagtgcagtggcacgatctcagctcaccacaacctccaccttgtgggttcaaccgattctcctgcctcagcctcccaagtagttgggactacaggtgtgcgccaccacgccaggctaatttttgtatttttagtagagatggggtttcactatgttagccaggctggtcttcaactcctaacctcgtgatctgcgtgcctcggcctcccaaagtgctgggattacaggcatgagccaccacgcccggccttatatgcattttaaatacacaacttctctttgagccccaagtctgggttagtgacatctcatacatgctcccagtacctgtattttctctgtaataatactcagctcctgccccttccatgtacctcctggttaagaagacaggctctgcagcaagactgcctgcacttagttctagttcaatacctttctttctctgtatgattgtagagaagtaattcaacatccctgggtcttgattttcttacatgtttaatggggataataatagaaccttctgcatagaattgttttaagagcaaaattaaaacacttagaacagtggctggcacacataaagcactaaataaatattagttgtttttaatatattgtaactgcctattttcttgactgtttatacactagactgtatgcttagttcctggcacaaggcaggtgttcaaaaatatttactgaaaaaagaatgaacaaggaaagagaggtagtgcaataaattgtaactaaaagaagagaaagattgctgtcctattcatgggaaaataggctttcttgaaactggggtatattctgataaggaggagcctgcttatggggccagagaaactgaatgactttgcagctgcccagctgctacagctttggggaacttgaaataacatccgtggaacaaaaatttgtttcagaatctgtgatgccaatctggactgccatctgcacaaaaagaaaactgggctcatgaaagagctttttcattctcttgggctatgtgactatctctctggaaagcaaatgcaaggctaaacctccggagttctccatttgctgcctttggaaggacagtctcaccaaaagagccagtcatcctactaagaacataacactatgacttccttttcatccctgcattgctaatagggcctcaaaggaacaagggctcagttctgtgaagtaaacacacacctttagtgtagtgaataaacactggaagaagcttttcacatatttgtaagctcggaagtcttttaggcattgagtagcagcagctcctttattgcttcatgcagctgcacggggtacctgcccggacaaacaatgaatccttcagctctctgaatgttccagttctgtgccgtgtgtgtgtgtgtatgtgtgtttgtgtgtgtgtgtggtgtgtgcatgcatacgtgcatgtgtgctggtttgttacttgtatatcccaggggaaaataagggttctttgcatgctttttgtcaacacaatgggtctctgttctcactgacctggttttcctttattccttccctctcatcacaagtttaggcagtctggctttcctcatccacagagcaaggccttcccctgatttacccctctctgcatgctcttcacacttccaaaccattttccatataggccccttaaatctaatttaaatacttccctctggaaagcctcaaatgatgagtcctgcctaattgctccctcctgtacatgtcctatgttgctttctaaaagcatcatagctctttatgtcatgggcataagttcttccttcattatttgtcaggtgtgtgtgcactccttaagctaaaattttatattatggcatctcactgagccaagaggaaggaggagtacttgtgtgaataagacctagactctgattgtgagtttaaaccgtttggaaataagaaataagatacattacttgaggccaggagttcaagaccagcctggccaacatagtgaaatcccgactctactaaaaatacaaaaaattagccagatgtggtggcacactcctgtaatcccagctgctcaggaggctgaggcaagagaatcgcttgaactcgggaagtggagattgcagtgagccaggattgcaccactgcactccagagcgagactctgtctcaaaaaaaaaaagtaagatacatcaagatagggactgtgtcagtcatggtcctctacagaaacagaatcagcagtaggacaatattcactttaagaatttggctcatgaaattatagtggttgacaagcttgaaatctatagagcagaaagtaaattcaggcagtaattaatgctgcagtcttcaggcacaatatgttcttttccaggaagccacagtttctgctcacaactgactgcacaaggcccaccaacatcatcgggggtaatctcctttactttaagtctattgattgtagatgttaaccacatctacaaaatacctttcacagccaacacctagatcaatattgattaaataacagggcactatagactagccaagtcagcacatacaactaattatcaaggacccatcaaccaacaaccccaaacacctgtctttggaattagactggaattatgcctagctcttctacaaacaagatgtataaaatccaggacaataaaaatttttgtattatttctgattgagtcttcacttcaaaacaaaataaaataatcattcatcctagctcacagaattgttttgaaaaccaaatgatagttcgaaagaccagaagcgcaagctattggtactttgaacaccttgacagtgcgcaagtagtggcagcacacctgttaaatattggtggccacacaaacacatcaccattctctctactgagcagacatgagagaagagaaaatcttgggcttttgctttacacgaatgccaatcaatttgtgcctagtatctggaacacacaactgattatcttaaactcaatggagggaaatatctttaaaagaagttaatttggaccagaaatatctcaggggaggtaggagtgaggttggagcattctttatgtacatttccacagagttgagtatgaaactttattccctgtaaaaacaaattggaaatttgaatgtgaatccaatttgccaggttatccttgagacgcccttccttctcacacctggatattaaaacttatctccatttccctgtgagtcttgtattcctgtcactaaaaattcctccagcctctttgcagagcacattggcaccaggcccccttctaaagccacaatgccgaagttctgattgcacctccgtattcctatgtttccggtaagtcttttaaagacatttggctcctgcctctggtcttgaatattttaggcctattgagtttagaatctagagaaaatagcagattaaatgtagctcaggaacaagagggtgttgtccagagaaagctgagagtgactggcacagcagacgtaaacatcgtcaccagggtgtacatagctttaactcaggtacctgcacgggcatcacaggcagcatggcacagatagttcacaggcctgggtatctatgcttatggactggccttccaagtgcagtttcctgctcactcttatttatcttctgataaagaattgctcccagcaaattactaaactaaacctactgctgatacttttactccagttgtaaaaacacattactccctctgcttctgcagaagtggaacatgcttctacaattcccttttctaaatttgttgatggattacttattgccccactcctcaagtttctgtggaggggattccatctaatctttaacagggaacagtttttgggaaatattaccttttctcccttctgtgctgcgagagcagagggcaaagacaagtaacagtgagtgggaattataggagaggtttttgcctcagtgagccttttaacccactagagatctggaagaaaatggagtgggtttctctgggaggtgatttgttctgcattcccttgctagaagatcacttgcctagacatatgtaggaagtttaacatgggttttcctcattcggaagaagggtggattcaatcacttctgagatttttcttgtgttaggagcatatatgatggaactgtgttttggtaaatcagtttcagttctacactgcccctaaagtattttgcttgttttcagaggtctgtccataaagcatttgtttcaaatacaaggcatgggggaggaggtgttatcacaatatcaaacccctgctaagtatcagattttctattaggtactctgcaaaggagatctgtttttatcctcaacaaccttctattaagtcaatatcattatcccattttttttaaccaataaaactatgcctccatgaatgtaactagtagtataaagacactcactcagcttgtaacagacagacctaggatcggaaccataaagacactcagctagtaagcagtagagttaggatgtgaacactgccttgtttggctcagaagcctgtgtacttggcatgagctctctgtgctgtccagtaagtaaaggtgcatgtgatgcccacacaggtacctgcgttgaaggtacgtacacccttgagatggtgtttacatctgtggttccaatcactctcagctgtctctgaacaataccaacttgttcttcagcaacatttaatctgtttttttttcctccagattctagaactagagagaatttagaagaaaatacatttcaagctttagttttccctcatgggaataactgagccaatagggaggtggcagtgtcttcctctcttctaggaataagtctccttccctgaaagacttttgggttttgagtaagccatcctggcagggaaaagaggcaggggagaatttttaggacgtaacagagctgtgggagacatatctccagtgcattactcactgcttaaaagacacccccagcctctgacatcacaaggagagagaattagatttcagatcagtagtgaaactgaggtgtgtcttgcttgaacacaaggaggcagccatccaactctaggctggctctggaaagtcccattttgaataatttgcttcttatgatgctttgttcagcttccctaccttaagtgaaactgtgtgacttaaatgaaagagcactgagctgaaactcaggaaacctaaatttcagtactggcaccaaccaggtgtgtaaccagaagtaaatcctttaacctttctagactcagtcatctttagtttaaattattttgagtctttgagtcttagaattcaatcttacttcagatttctataatggctcctggcccaaaaatagtggtgtgtgggtgttgacatggataattctttgtcacggaggaaacagcccctcagtaagaatctggaattcaagcctaggtctctttggtctaactccaaaacctaggcttcttccacctctcctaccctgacaagaggccatactattgtttcataacaaagtgtatctttattatttttataatccctgttagccttgtcattggcacagttcattagcaaacattcattgagtgcttatgagtgctgggaaaataaaaaggaaggggacatggtgcctgacctaagcttaaaagcattttcataaggagattctggagccacactgcctggatttagatcccagttctactatttttagactaatcatttcttaaactttctgcatacctcagttgcttcatcctcattttcttcatctttaaaattttcctcttagagttgttttaaggattaaatttgttgcttctgtaaaacatttaaaatagtgccaattatagaggaaagaccaaatacatcattgccgttattgttactattatatatatatgtgtatatatgtatatatatatgtatatatgtatgtcagtccccttgtgtcaggagtcttagaaggttgcaactgggtcttgtttgctggcacttaataaatgtttgttggatccaattattcaacacatatttacaatgtttctactatgcgcaaagccctctgatggatccttggtagaatccagaatttttacaactttttaaaaaattaccatgttttagagcttgcgtaagtataatttggaattttttttctctttcaatatttctcttctttctttttctgtggcccttgtatagaaagtattgaggaactgagaggaagatatctcacacatatgcttgctaacttaatcatatgagccatcctggaggaggtggggttaacaacacaccaaaaagaagattcttctctttcttaaatgataaatgtcttttagaactctgatgtcagacaagagagtactgcttacttttaatgggttttctgtgtcagagagagagaagggagagagagcgagagaaagagagagagagagattcattcaccactttctcattgactcattcattcaccctaaaagcacctggcgagtactcaccacaacatgaatcaggcattatgcctgggtaatgctggataatggagatacagaaatgaataaaacatggtttcttctttgggagagttaacagtcgtggggcagacaaacataacttgatttataacgcagtgtaataagaatttttcagaagcatgaataaagtgctctggaaggacacaggaaggcaggtagttgggagcaagatcctatcctaagtacaaataacactctgtactgagctgtacctaggaaatttataaattggattttattaaattttaaaaattagtatttcccatagctcggtcattcattatacgccaagtgttcagccatttcagctcaagttagcatattctttgagcacctattataaccaagtggattaggagactacatattaattctgaccatgactaggacaaggaaggtataagatatatgatttgaactctgccttaaagaatagatagtatttcataaggcaaagtgagaaatagtttttaagagggcagaccatgctcaaacaaatggaggccagccaggtgcagtggtgcatacctgtagttcgatctactcaggaggctgaggcaggaggattgcttgagcccaggagtttgaagctgtagtgcaccaagatcattgcagtgaataaccacttcactcctactgggcaacaaaacaagaccccatctcaaaaaaataaagtatgcagatgaaaaagtataggtttaattgcttagttattggaatgaaagtcaccctaggggattagtgaagaaaggatagggtgtagggatatgcaggacattagacaggaaagatggctgggcaaagaaaaaagggctttgcataccttccaagattttattttgtgtgcagcgaggagccactgatatttgttcatcagggaaatacattatcaaagcagtgcttcttgggatggttaatgtggttttggctacagtgacaggaagcagattcaggcttggaatcagaaaacataacagagattgatgaattgggattacttgtgtgatcttgagcaagttcataatcatttctgagctttagcctcctcatctatatagcaagcaagatgaaattacgacaagagcaacaatcacaacaacaatgtttattgatcattactctctgaatagcatggtggtagggcatttccttgtaatgtttaagcctcaaaacaactctgtgagttcttaaaaaggtaaacgtaaatttacccatatgacccaccaattccactcttagatatctacacaacacaaattgaagacgtatagtctttcaatatatgttccacaaagtcgaacacaaatgttattagcagcattatttatttgtttttaacttttgatttttaaaaatatatttagggggtacaagtgcaggcttcttacatgaatatattgcatagtgatgaagtctgtgggcctttattgtatccatcacccaaatagtgaacattgtacccattaagaaattttcaactctcacacccccttacccttccaccttttgtagtctccaacagccattatttcactctatatgtccatgtgtccactgtttaactcccacttataagtgaaaacatgcagtatttgattttctgtttctgagttaattcactgaggctagtggcctccagttccactcatgttgctgtgaaagataccatttcattatttttatggctgagtagtattccatggtatatatatcttagctgatcctgactcaagcagcagttgcccagacggattagaggagtgacaggaaccaagaaaagagctgtacaatgctgcaggcaggaagtaacaagagcttaccaaaggcactgtcaggaagaaagaaccaaaggtgttgacaatgaagccaaactagggtaaggctcctaattgtaccatattttaacttctctaaacaatcatttaggatgcttgattctatgaacaagagaagacaaagaatagaggacttcctttccttcagcaaacagctgacacactttcccatcataaacttcgtaattcaggatgtaaaaccagatccaacaaccaaacccagctagaaggttaaataaataagtgctaaataaataaacatgatttttcttttccttggcccatgagtctccatagaagatgccatgtgcttctggtaattgaagtctactagtcaattttcctttctttgtaaaattgggggaatggcctactcagggttataaactgaaactttgaggagttggaactttttgtatgttttgttttacattttctcgtcatgagccccatcattaatactaattatgaatcacaggtgagggagtgcacctaacatttcatcttttattttgaaatgctattaaaactcaaaaggcagaaacatagcctgtggccttggcagatgcaggactaggtgatttaatggggtttttcctgcattactttctatgactgatattttgtggtgcagatgtgactgccacattgtgaaacattattattaataaatccacattccccaaaacaaacaagacagcatggcaaacagtggtgtttgctctgtatacatttgggttggtttttcatcatttcctaggaccaaggccctgctgcttcccatcacattggtgaaaaatgtgagaattcacagtttgcctattttggcaacataaacatgggaaaacttgtggtcacagggtcaggactcttcgttctggagggcctggtagcaagtggatggggtcgtgagggagcttccttagggaggacaatattgaatctagaagttcacaagacttagcccatgtaataaagagaatattctgaataccctttaatattcagtctttcagtcactgtccccaaagagccaagaaaagctaatgtatgcccccccatggtaattaatgttcaagcttgaagaaacttgaagaaatcttaaacgtagcaacactaactgccaggtttgttagctgttataagaattcagccagtcacaacacattcaaaatgccattattagacactgactatgtgtgtagcagggttctaaattacagtcccagtcctcagagggattatagtgaatgcaggtggggataatatttaaatgtgacacatttacatattaactaacaattaaagtggatggtggttttcttctcagtgaagactttcagagctgtcctgcccccacaactggcgagtggagcctccatcttcgaatccaaacaattcgatctcactctattagagataatagaaaggtcatgagttttgacatcagaaactcacaagtcttaatcacacattgcctgtgtattaggtggattgtaaactccctgagggcaaagtctgtttaaacactgcgtatctcagaacccagcacagtgcccaacatttagtaggcactccacaaatatttgatgttgaacacataaaattagctgtaatcctagcaaagttaacttctgagtccagcgttcctcttggtgaaacaggaggaatcacacctgctttaaaggagctgagaggttgactagaacggagggtgaggaggaagactccagactttccttgcctgggcccaaattctggcctggcaatcattagctctgtgattttgagcaaataacttgtctttgcctctgtttcccacaccagcaaataaggacaataatatcgcctacgttttaggctaggcatagtggctcatggatttttggaggctgaggtgggaggatttcttgaggccaggagtttgagagcagcctgggcaacataacaagaccttatacctacaaaacaaaactttataaaagtagctgagcatggtggtgtgtacttgtaagtcctagctacttgggaggctgaggcaggaggatgacttgagtccaggagttggagatggcagtgagctatgattgtgccactgcactccagcctgggtgacagagtaagaccctgtctctaaaaaaacaaaacaaaaaactgtattagcccattattgcattgccgtaaagaaataccaaaggttaggtaatttataaagaaaagaggtttcgttgactcacagttctgtatgatggcctacaggaagcataataatgtcatctgcttggcttctggggatacctgaggaaacttaacagtcatggcagaaggtgaaggggaagcaggcatgacacacagccagagcaggggcaagagagagagggcaaggtgccacacttttaaatagccagatcttatgagaaatcactcactaccgcaaacacaccaccaagggaatggtgctaaaccattgatgagaaaaccaaccacatgattcagtcactttcaaccaggccccacctccaacactgaggattacattccaacctgagagttaggtgggacatccaaaccatatcacaaacctactttttcagtttgttatgaggattaaatgaatatttgtatagttcttagactagggcctggtacatagtgtgttctatgaaaatagttttaaaatgccttatatagcctgctacaaatgacgctgaataaatgttaaagaacgtgaagtttgacccccatttcctaaactagcgcctggcttactataaatacacagaatggaatataattattaattgggtgttacaggttttctgaagctcaagctagaaatatgggtttgtgggctagaaatatggggaagagcttcatcaaggacaaggaacaaaattgtaccttagtggaattaaatggcagtgataaggagttcacagagaaggcatataatctgcaaaagctggaggaaagaaggatcaggtcacagtcacaagatgctccaccatcagcaggacttggcaccagtttctgggagaataatttgtcatgatccagctttttaagtgagcttgaccaaagctctgctttagttctgtggtttcaactgcacagattaatactttgatggctgcttgtttattcatttatttattgaggaagtatttatgtagattctactatgtgccagacattttgctaggcagtggtgaataaaatagaaatggaagactgggcaacatatacctgggtctacaaaacaataaaaataaaaataaaatagccaggggcagtgacacatgcctgtgatctcagcctctcaggaggctgaggcaggaggatcccttgagcccagtagttagaggctacaatgagccatgatggtgtctctgctttccaacctgagtgacagagcaagacctgtctcaagaaagaaaaaaagaaaagaaatggacttcctctcttttggaccaggagggagagacagactataaacaggaaaataaatagattttgataagtgcttcaaaggatattaaaagggcacggtattgctcagatggaaaaatgggaaaaggtctgtccaaggaggtgatatttctatggaatctagaaagataagaaggaaaaaggagactattccaggatgggaaacataatattcaaaggtcttgagaaaggtatatttgagaaagaaggccggtgtggctggaacagagtgagctaggagtgagtggtgaaaaatggggttggtggcatatagacagggccaggtctcgcaggatcttgtaggtggtggtaagctatttggattatattaaagcaaattgggcagccactgaaaaaaatggagaagagaaaatgttatatatatatatatatatttttaaaaatgtaactcagatttcaatgtgtaataaattggattggaaagagaggatatgaggggaatgttgaagaagtctgagcaagaggtgatgcttgcctaatcaagaatggtagcaggaggaagtgagggaagtggaccgatgtgtaatatattctgtaggtgaaatagataagatgatgctgataaattagatggggagggactgaaagtagaaatagtaagggagagaaaagattcaagaatgaaatccaggcttctggcttgaaccactgagtgagtattaatgccaatgactaagttgaaaatgttaaaagagggaacattgaaaggtggattgaggaaaaactcaggagtttggttttagatgttaattttcagtgatctgatgtagccaagaagagatatcaacacagcagagaaaagattaggcagagagataagttttaagagttgcacagatctagaaggggtgaagggcagtgggacccagaaagcaggttgaggtgttggcctttgttaacagcagggacacctggtgaaagaagaagaagggaagatgtgggtgtaagtggaggtgataatcatcatcaccatagcttatatttattgatgtgtaccaggtaatgttctaagtaagtttcatttattaactcaatcctcttagtaaccttatgagtaggtttgtacgtacactgtatcaaaactgagagagtctcatctgatggtctacattgtggaaggggagtcaagagggacatttgaggagagaagctaggacacagttgggatagaaagtattcagtggaacttccaggcaagactgagagttcctctgagattttaaattatgaatataaagtgaatctaacccaaaatgcaaatggattttccacagcattcagcaatcagacttcagtggcctgacttaattggtgcttcatgtggaagcagggataatttccaatgccaggagtaataatcaagtacactattatcccttactagtatgctagcactttatgtactttcatgaagctgccttggggacttggccacaagaaaccttccacccaccaggctacccctcaatccctgctcagaagcagaaaccatggctccatgaaagaataatatctagagtgaactacaaccactcatcagaaggatgaagaaattgatggctgactttaagcctcaattctggaagaggtccaaactggatgctttgtcttctacctcacagctttccaggttcctctcagtgaccagggtacctcctctacctaagaaatcaccatcagctctccccactgccaagagctcataaatgaagaagggatgcaaaatctttacttgacacagaaagctttaggttgacaacaaatagcaatagctaacatttactgagcatgtcttttatatcaggctgtgggctaagtgcttttatatgtagtatttcccttcatctttaaaacaaaccagtgagataggaatccttatgatctcatactacagataagaaaagtgagctttagggaggttaaataatttttctcagaccaagaagctaacaagcagagcagccaagagtggaatccaggcagtctgactctagatactaggctcttttaacaagtacagtataatggcaaatcagccaacatctctgctggatcaagctgttgtatatatccatttgttgtcacatgttgtcacctttctatagatgttacttagaaaacaaatggattttatttccaactatatttagaccggtttctactctcccatgttctcaaaatgagacactaattgtgggggaattatggaattaatagattttattatttccctcttttgaaagcaaacatcctgttacagagtcaagtttatggtttgttggttttttgcaagcctggtgacctatgttaagagaatttcccctgaagtcaaatgtgctgacacatgtgacagcataagctgcactccatgggctccaaggactggcaataatgacctgtttttttttcccaccatgtaattatgaattgagatttgacttttaaaacaaattcccagataattgaggtcaatatgaaaattttagtttcaatatccgagtatcttaactgtgtagattatttgtgagtatactgataataagctccttatgttgtcctacttttaggtggttgtagcctgtgaattgtttttttcataaatgagggatatatggatttgcatggagccattcacgcattctgcacataattagagccaaatggtactcattaagattgaacatgagatgttaatttccattagcgcctggggaatctgcatttttaaataaagccccagatgattcttgtataaatcgaagtttaagaaacattgaatagatgtgctctaattgtttgatttattttctcttcttttcctattaaggataagaaaaattaaatgacctttaacaggcttgactatcactacaatagtaataatagccaatagttggtgaatgtttatctttgctgaatagtgttttatatatctatttcatatgtaacacattcttaggcagagattatcattagccccattttgaagataaaaaacaatgagatggagagagtctaagcaacccaagatctcatagctactgagtggcaaagcgagggtttagaattatacttttgcctttgaaggccaagtcattatctggagacagataacaatggatataaatcacagctttgctacttaccagcttgaaagatgagtttaataatactgactttgcatggttattgtaaaaatgacagaataatgcatataaagcaccaagtatatgcctgccaagtagtagatactcattaaatggtggctattaaatgtcagctggaaagttgaacaggtattccatgattttgatcactgtaatcagtgaacacacgtaatccaaatacctgcctacatatcgtacactgttcttattgttttaactctccaaattatttacataattatctctacctcctccttcccactatctctttagatatgatctgtgcctaagactccctaagacactaattctacatgatttgaaaagtaacataaatacttctattgtttttctatcctaaggaagtttgaatgaatttaagatattttccaatgactttagtacgaatgtttgcaaagggccagagctccctggaagtaagttgaaaaacaaacccagctgtaatagcctggtgacccagcagcccagacctgccattataacccatttggggattgcatggtaattgggtccatggcatttggcttagtggttctgattgtgacacatgatgattcaagtttattcatggacacactaaagcatcacaaaatgaccttttttgaggtccttgaggtcaggcggggagggagggagaagcactggggcactctaaacaaagcagctttgtttttacaccgcttgcttggacaagtgtctcctcacgtgcagcagtcatttgctgtggagctcttggcagagtaactaaaatgtgacagaaatgaagggcaaattctgaaatcccctggaaaatcaccctcccaagcaaatatttgccgtggtattgtagctcgatgacttattttttgtcattcactttttttggctcattcctttcctttatggccatttaaaaggtgggtaaactgaatatttattgagcatctactatgtgcattgcatgtaccgtactgagtttatggaagatagagtctgagctgaaatcatttaccatctctagaattcatcctccgtgtctgcaaaatggggatttgggcttcatcagtgattcccaagttagtttatagtttattaaaccatattcagcaagtgattcccaagttagttacatagtttattaaagcatattcaacattgcatcttctatttaaaacacacacacaaaatcttcagaaaaatctttagaaaccaagaaaataaactttaacaaaatcttctcagccaatagacatacaaaaagcatagaatctcaacaaaagggccacctgaatctgcataaaggctaggtatgtgattttgttgttgttgttctcaaccatataaaactggttgagaactccagatcagataatctctaagatttatctcaggttcaaaaagctctgtggccggacatggtggctcatgcctgtaatcccagcactttgggaggccaagctgggcaagtcccctgaaatcaggagttcctgaccagcctggccaacatggtgaaacctcatctctactaaaaatacaaaaattagccaggtgtggtggcaggtgcctgtaatcccagctactcaggaggctgaggcaggagaatcacttgaacccaggaggcggtggttgcagtgagccaagattgcaccattgcactccaccctgggtgacacagcaatactccgtctcaattaaaattaaaaaaaaaaatctgtgattttatttgggcttctctcaacaaagttggtgtttttgtagctcagagaagatatatctagcattagagaaggataaatcattatggcttaagagataatcagtcatttctaatatcaacttctgattgtttattcatggacatatgtatgtgctgacccacaaaacacaattttctaattgattctactgatattggccatcaaatctaattaatttagacccaaagtgaatttttttggttttctaaagtcagtcttcactatcttcgtagcccaaattagccaaataatttaggtaagaagtatttattctaccatttctatcaggtttctctctgatgcctgtgctttgcaaacaggtcagtaaaagagataaaagaaataagcaataaatcttaagtttttttcttgtctatctgtattttatctgtatttttttgttatattagctattttttttattaattcagtatgttccagcaaaagaggagaaaaaaacacacagtaaagggaaaatcaaagaggagagacacggttaagagactgactacattaaaagagaaaggggaggaatgaaatccaaaaagaattttcagggaaaatctctcagtaaaagaaaaaaagagaaagatattgcataggatgtgtttcatgactcatgcctggctctgtacctgagtgattcatttggtggaaaacatagctggctcagagaacctttcacaggccccagactttgttgaaatcatttgaagcttcattttgtgtgtatattttcctcacttctttaaaactgaaatattaattgcttatgagaaataggccctgatcattggagtttatgtgtatggccacttgagatttagaagtagatcagggacttcgaagtaggggaagtgtttaagaacctgggacaggtttgttcctagtggcttttctttatctcccagcaggaataaatagtaggtccaagggaatcctgttggatagagttcaaaggggacaggcccttggtaggggcagactagattagtggctttcaaacttttttgatcatgactcacaataaaacatatattttacattaagactcagccccacatgtctgtgtgttttgtgaaataatacttacctttactatatatgctttacttgatattttctattctattatattttattccattctattctttttgttttgttttgttttttgttttctgacggagtctcactctgtcatgagtgcagtagtgcaatctcggctcacttcaacatccactgcccaggttcaaacaattctcctggctcagcctctcatgtagctacaactacaggtgcataccaccatgcctggctaatttttgtattttcagtagagacagggtttcaccatgttggccaggctggtcttgaactcttgacctgaagtgatcctcccatttcaaagtgctgggattacaggagtgagccgctgtgcccggctcccattcttttcttttgttgttttaaataaatgctggcaaagacctattaaaaatatttcacagctcagtagtagatttctatgtacaactttccagtttctgtcctctctgcagcaccctctaaacacacacattgttaaaatacagcacaatatagccaattttcaggaacatctctctggcactccatccttcacactaaaatacttgcaacttctcgaacaccatactgtctttcacttccttcacgtgtcgccctctctgctcagtgcacttgagtactttcccactccaattcccctttgttcatcaggctaatgcccgctggtttagacccaattcagaggtcaacgtctcttattagggctgtttgttttctgcactctcctgagcatccggggcttatctttatctcagccttatcatgctgtgttatgatgacccatttatatgtttttctttcccactagacttattggtggcaaaaactatgtcttatttgatatccacaggacctggcctaatgcttggcacatacctgattaataaattctggatgaatgagacctacatactggtaggcacgtgatagggagtgggctgacttcttggtaaactgtagtctgtttacgataaacaagaaagcatacttttatggagaatgctcagcttcttttagttgatgtgctgaccctcattgcaattctttttctgttgccaataggagataatgtagcaaagtagctatgaagtcagactgaggagctgcacagaactggatttgacttctggctcatcagttactagctttgtgaccttaggcatgttacttaattcttttaaatctcaggttcctcatttgcaaaataggaataataaccttctgtggctgtggttaggattgtgtgagtgttattaaataatggcatatgagctccatgaggtcaggatttttgtcacttcagttcattgtcatgaacttagaagagaggctggcgcatatttgttgaatcaatgaatattttgtacataatagaccatcaataattcatagcagctcttattcatgtgaatttttcaccaactcttacacgaaattttttggagtatgtatgatgtgcataataattctgtatcccttctttagtcagaagttagggacccacctgtgaggtgacccttccagagcctcaaattcagtgacacaagatgcatgtagaaacagttgcctttcgaaagaagttgttttcaggctagaaattaagtttaatcattccaaggctgtttgattctgtggaagttctacagttctgtttttgagtcatcgcccatcggcatttgactcttcgtgtctcttttcatacatctcttagccatatcaccatttgctgaatattagactcacacagattcagattcagagtctcgggggaaaatgattgcatttctaagtgttcttggaactgtttcacttgcttcctcgacagatatcttgtgtaaggtccataaggatagaaaatccattattacctaagaccctttactgtttcccatttcatgaatagatgtttgtatttcaggttttcacttgggtctttcccatgttcagtacttttataagtaacttattgtgctacaacgaaggtattgttttaggcttttttgaatttcatcagcatgcagacatccctacgtactatatttctacaaaaaacccacaaactttaaaaagtaattcccaaactcttaaagaagccaggccaaataaaaggatggcattgctttatttctatggcatattgaaacagtaagaatgaaaagagatcctcaagagagcggttttaccttgcttttactttctcatgcatttatccaaaaagtcctttttattatattattcattatatattattcattgcagctcactcctcagataattaacccacttctatgataataatgttactccattcataaggactctgccccttaaaggtgctacctctcaacactattgattggggattaagtttccaacacatgtgctttgggggacacattcaaagcaccagagggcctggtctaatgattaggagtaatcattagaatggtgtaattcatcatggtgtaggtagtaaagttaaatgatccaatttattagtccattattcattcattagtccattatggttgcttaccttacatatgactaggttggtgaacaaggttgtcctattacttatcctattatatgtaaaagtctgcccaaagctgttttaatcatttgtatgaatgtaggtaccatttcaaagtgcactccttatcataaactcttgagatacatactaagatgatataaaagagagtggcaaatcctatagcactgtgctaatttaataacttacaaagttcatcaatagaacaatatacttttgttctcatgctgactcttgttctcaagttgaagattactccaaagtcactatagtcatattatgctgtctggggctcttcattgaaattttgaaaataggaggaggagcatatccagtggtgaaagagaaaacattttggtaagtggaaatgggagaaaaggaagcttgcctgactacctaataggccttacttagttgcttcagtgatggggacctagtagaccacagaagggccaagctgtctggaaaagagaagggttgtcatttctggaacccctactatgtgccagatacttcatgggtcttttacatctttaagttgaacctatgggggattttattgcattcgttttaaagataagttaactgctgtccatttaaaaaagtaagtacagttgctttgcaagatcacacaacttttatggggcagggcctgggcttgagtccaagacttcaaagcttgtgttctttccactagccacctactctcagaatgctcctgttaaacccattatgtggcaagtcaggtatgtgttgcacttgacatcttttttagttttccacttgtacaaacattccctgaaaaattgtggagaggttccatacagtggaacttgagatttcatctactcagccttctaccctgaaaggttcctctgagctcatcactgtaacctgaaatgtctttcacatggatctgaaaacatttagtgaagtagaaagtactgtgctcatagtagtcattctgtggtacctttttttcctttttaaaaaaaggaaaaagtttagttgacaccaaatagttgtatatatttgtgggatacagagtgatatttttatatatgtatacactgcataatgatcaaatcagagtaattagcatattcatcaccttaaacatttatcatttctttgtgttgggaacattcaaaatcctctcttctagctttgaacgtatacaataaattgttattaactatatttaccccatagtgcaatagaaaactacaacttattcttcctatctagctctaattttgtattccttacccaaactctctgtcttcctcttcccactaatcttcctagcttctaataaccataattctactctctattatgagctcaatgttttttagcctccagatattagtgaaacttgcagtatttgtctttctgtacctgacttattttacttaatgtcctccaagctcatccatgttgctgcaaatgacagaatttcattccttttcatgagtgaatagcattccattattatatgccatatttcctttatccattcatttgctgatggacatttaggctaattccatatcttggctattgtcaatagtgctgcaataaacgtggggtgcagatatctctccaatacattgatttattttcccttggataaatacccagtagtgggatcactgtaatatggtaattctatttaagctttgttgcaaaacctccataccgttttccataatagctgtgctaacttactttcccatcaacagtttataagagtttgctttcctccacatccttgctggcttttgttattttttatctttctgataatggccaaaagcttttagcttttcctcactcattgtgacattagctgtgtgtttgcctgttttgtgttgaggtttgtaccttctatgcctaatgtgttgagagtttttatcattaagggaaattgaattttatcaaatgcttttttctgcctttatttgtaggactttttagtaacaaatttcattatagaatgtaaatattataaggaaaaaatatatgttataatatgaattaataatggcatgaatattaaaaccaaacaaaatgcatattggaaaaattggcactattgcacaaacacagacatctaggggaatgtctttctctctggtgttcgtgtttttaccttcttcagccatgtgaaaagactttcaaaggttctattttattctcagagttgacagactcacccttcaacagagtgggcatcaaaagccaatagctgccttgagtaaattaatttttgttgattttagttcccctttaagacttcctgagatactgatcatggaaatgaatattagcgatttaattctggcacctcgtcaggactcacactgcattcctgggtgcagcctggaacatcactgctggctggactcacttctccttgcccaccaagggacctgaaaaccacattaaggtggagaggagagtgtggcacctccttgctcagagatcggccagttcactgtactttattgactgtggactgttgatttatccagccttctcatttcacatgtgagggagggcgatttggagtgacttctgtgcacttacatagctgataatagaggatggaccagaatccacatctccaactaccagtccagaattctttccattccccagtcactcacttattcatacattcatctaacatttattggatgcctacagtgtgtgtatagctgtgactacaaagatgaattggacgcagaccctgaactcaagatctttaccctggcttgtgtttttgatttcccagagggtctgaggtccattaggaaggtgactatctgccagggcagtctctccatgccggctggattaggcaatcactgctggccgtatgcagtcccgttttcagtgtccaagtctattcttcatagatggcctattctctgtttttctgactttcttactggggtttctcacccaaacatagcattactgataaataatatttaagtggctgagctctgaagattaagctattaatatcacaaacaggctccatattctctctagtaaagagcgaaaaagagtcagtatgtatgtgtgtgtgtgtttacacatatgagcatgcggtgtggctctctgagacacttagaagaaaagttcctgcgtgctcatgaaaggcccatagtacagctatgagtatattccaggcctcacatggctgcagtattcaccagattaccaatattagagaagcagatttttttctatgggtaatttttaataatttaagggctctcatttctcattatttcagaaatccaacttggagcttctcatttgatcagcaagtattttccaagggcctcctgtattctcagccctgtaagaggtttgggccttggaggctgagtcagagatcatgatattcaaaccgttttcactttcattttgttgttgtcattttctctccatttgatcctgaggtaaaaaaggactagtaatattatctctatgtcacagaggaggaaccagaggcacagagaggcttaatgacttgccaggaccctcaaggctataagcaggaaagcaggggcgagaccaccaggcttcttaccgctaggacaatgcttttttttttttctaactatgccagattgccagtccatattttttttaattcaggaaggattagagaaaaaatattgcaagcatataaatgtaatctcatgatagaatagtaacaattacataaaaatactaaagttcattttaaatactacctaaactaggtcatgaattcatcctatagctttttctcccagcaggcataattgagttgctttcccaaatgccaggttattctacccatgcgagttataaagacctttttcttgaagggattactgctgaacttctcctaagtcatgactttgtgatgggagagatataagtaacatgttcgttgggcttttataactctagagaaagctcttcctaaatcttggagcttactgctcagccaacttattgactttgtttaggaggtggccattagcctctcaaaccacagaggtttggactgttcaactacagtaagcccagaagcaaagagagattagaacacagcatcactgggtgaaaatggggaaagctaaactgcttcgaaattgcagtgctctgtcctatactcatttctggaggaatcaagaagagcctgaagcagaagtgacccactggccttggagacaggaggcaatggaaaagcacagttcatccacaaaccagcctctctgagcatcagcttcctagctgcgtgacattcccaagactcttccctgcactaatttccacatttataaaaaagaaccacagatgtgtccttgatggtcatcttactgtcatctgttaccaccacatacgctgtcttgttatgtggcttgggaaaatctataaactggtcttttggctttgatcacctgattgatttactgtcagcagatgatattaaaattagctttcatttgttgagcaaatctggatgggcaattgaggtggaaacagggagtggcctgggtggtggctggaattagaatagtaatctcttgtgttttagaggttacaaagcactttcccacatgtagtctcattgaattactacaaagtcctgcaagggctggtattcttaacctcatcagacaaatgagaaattgatgttccgaaagataaagtgactggtcagcattcacaaaaagatttggtggcagtacaaaaagtggaataaaagcaaaagctcttgcttgctttctggtgcaacacatcagagattgattagaatctactataaggctttttggctatgctgagatgatcgacaattaattataaaacactgtcaacatagacactggtgctcttctctttctgggctttcatacctgctcttcttgaggtttccctccccaacctctatctgtgtgtaactccttcagtttatcacttggaaaccacttcctctaagaagacccaagaccttgctagatgcccatcctatgggtttccatggcatccaaatattacccacactctgttcataccactctaattcaattgcctgtgttggaatatagctccatttaggcactaagaatacttattcacgagtcattcatgagtggttattttttcaccattgtaaccacaacaccttgaacagtagaccctggataaacatttcttgagaaaatgttgcctgatctgctgtagccaagaggaagttttgcttccacattgccctcagggctgggagggaattagaatctcttcccctaccctcctgctttattaaggtataatggacaaataaaaattatatatatttatggtgtatagcatgatgtttatatatatatgtgtgtgtgtgtatatatatatatatatacacacacacagtgaaatgattaaatcaagcttgttaatataatctgtcacctcatagactttttgtttatggtaagaacatttaagatctactctctcagcaattttcaagcatacaataccttattgttagctaaagtcaccgtgctgtgcaatagatttccatagcttattcctcctaacagaaactttgtaccctttgaccaatctttaaagccatccaagacagtaccatttccagaaggaggctcttaggaatccaaagaaaccaaactctagctatttgcataaaatgttagatcattcccagaagtaagccttagagttgagagagtactagaagtgtgacaaggatggaggttagcatttgtgtatccttatgggaaaacaggtaagagcggatatttttggagttactgggaaacttaaccatgacacttggcctgcttatgtgtctggtattattgctgggaaccaagcttcatgccaaacctctagctatcagatgtcagttttgggaagagacttgaacttgcttatgtggttatttataacagtagttttctattttgtgtcaggttagaagacaccatcacaccactgaaatatgttatcagaaccacatgcagatagaatatcgtaaatatggtagatgatgagcaagacctaggactcacaattcaggaagatacagaacccagcatttaacctagtacctacatgtacaaaatcctttcaggtatttaggagttaataagcatattaatataatcatcctacaaaatgaatttgtccaatcttgtcagtgaggtcatttctgcaaaattttaaagggcttgtagagtttgacaagagataaacattacaggcattgtgctgaattttcagcaaaagcagtcataggcaatataaaacaaaagagcacgactgggttctaataaaactttatttacaaaactaagaagtggaccaccatgtttgctacatcacggttttctgaccctggtaaaaatacacctatcaattcccatttttactctttcatttccttctggaaatctttcctatgttctccatcatccataagctaaagcctaaactccttaactctgctctgatctgaacagtccctcatatttagtggtccttttcctctctttgtgctcaagtcacatttttccatgcggataatgccattctcaatgctttctacttagtccaattctacccatcctttaaggtagatgtcttcaaatgacatagaggggtcatatcagaatcatctgggaagccttttgacaataaacacagtgctcctctcccacactaaattctcgtagacccagtgaggagaatggggaaagcagggacatacagggttggaaaatgtccctcgccttattcaagaaattctcaccttcttttaaaactactgctataggacattactaaaatccacttcctccaagaagctctccctgatcacataaacccatactcagcttttctttctgtggacctcctcagtcctcaatgctcacaaaattcattttaacacctagagtattatttggctatttaagcttttcctgtgccaggcactgttataggtactggtgtacagcagtgaacatgacagtgaatgcccttctctcagaagatgacactctaatgacttgaagagacagacaagtccatgtgcccaaaagagtgaaaagataatttcagacaatggaaacaagataatgggataaggagtgactggaaagcaaagcgtaagggatggttggagggataaggaagtgctgttttagataaagaggccaggaaaagcttaagaagtctgtaattgagcttaaaatcaaaatgcaaaaacccagaggaaaagaactgcaggcagagggaatagcacagttttatctttcccttctgtgaaaatcctattgaatatagaatgttggagaagcaagactcatagagatatgaaaaatagtcttcttatttagggttgttagataaaatatgggatgcctagttaaatttgaatttcagataaacaacaggtaatttttttagtagaaagactgattgtagtataataactgaaaaaaagtattatctgaaatttaaatttaactgggtgtctggtttgtttgtttgttttgggttaaacctgacaagcctacattttattcataggaaaaaggtggaccagggtgatttgtgtctaatatcctccagctcctttaaagctgtactgagacaaaatccgaatctaagcagaagcaatttaatttggtgttgctatttcagaagatcttatattgttttctgactgtctcattggatagtaatttgtcttcctggtaactccttaataacagattccctatgactttttaaaaatcatatactaagttcaatattaagtaattaatttattcttttatccttcatctatcacaagccagtaataatagtactttcctgaataaaaggtgacaggcctccattctcaagtatagtaggagaaattagcagacataactcatttaaaatcagcttggatcatgacaaagggccgcagcagaggcacccaatagactgcgtttctgagtagggagatccagcatgggaatcaaggaagcctgatgtaggccttgatcaatggcaagaatttcaataagggattatagaagacatcatccaggaaaaatagatcaaagacaatgtgctgaaaataacagaacttgtattggtaataagtccgtctctgtggttgaaacagagaatagctaaatgataagagcatgagatgttagacctgggttttcacaaaccctgtacaccaaattaagggattttatttgttgtctttatttgatacctttgaaaacttgtggacgtctaaatatttttgagctggcacttgatgtaaaaagggtcacaaatgaagaaaagcaatctgatgcggtgtaaaaacatggagaccagtaagagagtgactgcagaagtcctagttattcaaatgaagactcaactctaatttataataagacaaaaggaaagagggcactgaatgcaatagatatttttgagatagaaactccggagcctgccaactggtgggttgtagaagttgagagaaatggaggaattgaagataaagctgagattttaaatcaacgtgactgggagaaagacggtgccattcacaaaagtatggaaaacctagggagattggtagattgtaggtggagaagacttaatcatttttaaatattgcattatagaatgtatagctataaagagcatcatgataatgcccaatccctttgtttcatgtagaagaaaatccagtgggagtaagtaacttgcctgtgatcactcagtaagttagtgaaatagccagttctggaaatctgatgccctattttccctaaacagtgtttcattcataagatgggctgtcttatgatgagtttatagaagtagaataattgtgtggtgctgtgcagtgatcagttggaaatacagatgtggcacttttgtaaaagatcggggacaatgatttgggaggcatctaaatgaaaataacatttgaaggtgcgaaaacaaatgtggtagccgaaatagacgtagtgcatttaagtcaaatgtgacagatgacaatggggactaagaagaagtctccactgaatttcacatttagaaggccattgggatgagagagaaagagagggagagagagacagagacagagacagtgcagagtgaggagctggtgcagaagtggaaacaaaatttaaaattatttttctggaagctgacagtaaaatgagaaagatagaatatcattgaagcagggcctaaagaaaagctttcaggttgttgttggataggagaaaaataaatgcacatgtaggtagaagcaatgaaagccatggagagcaagagggtaaagatgtaaatgagtgaggatagtactgaaattggtgaggtcctgcaagaaactagaggagacagaggagcaggaaccaggaggacactgaagcagatggttaaaagcggagatagagaagcctccacagcacaaagtggtgaagtggatggaattcaaattgacctttatctcatcagtgaggtagaaagttgtgttcttggttaaaagttagaggatagaagtgggaatgggaatttgtgaatagtggaaatgtcttgacataatgactgtggagaatcagtagagagatgtaaacccagattgagggccttgctgagggtaaagtagtgcatttgtggtagacctaatcaatctagtttctatgctgttcaactatggaagcagaagagaaaatatgaacaatgggagatttccaggaattttcaggtggtggtgagtaccggtttttttgttgttgctgttgttattgttgtttttaaattactgttgatggaattaatgttaggtaaagagtcaagcagactgggcaaatgtctgcttgccatttgctgaatgaaggagttaagtcgagggccaaggtcaggttctcaagggtgcttttgtgccaggctttagctgcatgttgcacacattatttttttatccttgtgataataggaaaaattagataaatcataaacttatgaggtaaccattactaccccaaatttacagatagagatcctgaaactaagattgagtgaactgtgtacaaaaagacccacaggagtaaatggcagaactttttcaaaccctgccttgccgttgcctccagtagccaggaaggaaatgcaaaattgggcagataaggtagctgaggtcagatgaggaatttcagaaatagagatggaacacttcctaatgataagctccaaagtgaagcagtggtgacagaggaagaatcaaaatgctggttatagatgtcaaggtgcaaggaattagagagttcatggatttttttccggaaacttattattgaagtatcatatgcagagagaaaagtgcacaaatcacaaatgtagaaatcagtgatttttaataaaatgaacatacctatgtaaccactacccagaccaaaagaacagataactgccaattccatagaaggcccctggaagtccctcctagtcactaaaccccaaaggtaattaccatcttgacatcttggcttaatatcaaagattagtgtttgtctctttggagctttgtattaatggaatcatactatttaatgtactttttaatatctgggcattttttgctccacatttgtacttatgagattcattcctgttgtttcatgctacagttgttccagtagatttaaccactaatataaccatgcaaatagttgccaccttttctaatgagaaaagagtcccattatgtgaggcccataaacaaaagattatgtatatttttatgcatttttattggatagaaagtgtgggcaacttgacagatacatttctgacatatacagagctatgctaacattgcatttagatatagttactaaaaaattataagaaagttctgcatgttctactctatagtactacaaacagccttgtaattagaaaaaagaaggttcaaaatttagtgcaatttacacatacattgtcgattcaggaaagaggctaggattcaatgaatgcactgacattttgaaacaaacaaacaaaaaatcctgtgtctttatgagtgtttggaacttcaggattcaccaaactattcttggttgtttggaaatgatgtacacttagtcctggaagaagatttaaggaaacaccacctgcctttcagtagtatgtttctgggaaggctctatgttaaccattctgcaatacaaatataaataactagatacactttaagacacaagacgtaatggtctaaaaaatgatgttccagagcagttggaaatgcagacaagtacatgattaatattgcaaatgggtttataaaatctccaagttgctcaacctcccttgagactcagtttcttcttctataaaatagagataatgctccatctagctccctgggcttctatgtgaatcagatgacgtggtatataagacagtactttccaaattgtaagacaagaatatggtatgattcttacttgcggtaaatccttttcagttgctcattgcaggtcaatgtgaagggggaatacccagatacgtagcaccacagattgcagcaaagtttagccaggtgatgaataagtttgcctttggaatcagacagtcttggatgggagtacaggctgtgccactcactagcggctgtgtaactggaggcaagttattaatctcctagagccataaatttcatttctagaatggagatcatagcatttgttagacttacctagaggaataggtaattgtaagaaatgcacccctcatggcaccttgtgctcagaattataccaataaatagtgtcggttaccataattctattatgataatagcaataataatagtatgatggcttcaagcagccacttagtgctgttgatgtacaaggcaaacattgacgtcctggggtagtacctgccaggctctcccactgttttgttacttcattatttaagggaatttttccaggctgatgatagcaggcttggaaccttggtagcttacatcctgtggcctctgggcacctacaaaattcaggtgtcaagggagcctcatgtgggagggcctctgatagaggaactactctcctcttctctgctcccagattctcaggtaagccctgtgcctttctgtaatttcttgatgagttttagaataatggaacatatgagcagaaagagacctctagacatcatttggtacaacacccacatttcatagcagaagaactagggctcatagaggctaaggggctttcttttagagtgagctggtgataaagccgggactataactcaaatctcccaatacccagttcagaacactttcttctcttccccgctgccctcaggaggtggcttcacctccactctctcaatgcaaatggaggattgttatctgctttagatttgggcttgaatcttattctccatggaatcccttggacaatgctttgcacataatagttactcagaaaaaaagtatctttaagtggaattcaatttctaggataccctcttctcatattcaatttttagagcagaaaccaaccttaaatatcatctttaaatgaccaagttcatttctctgtgctgcacatgtcctacttcctaggaacattctcctctagttgtcctgggcagtcaagccatctttccattgctcttccactgcccccactgtacagctacgtgctaatgcttatgtcaagatagcacaatatagtggctaagagtataagacctggagtcaagagagaatgaggttcctggctgacacttactagatctttaatgactctaaacctgttttcttatctgtaaaatggggaaggtaatgcctactttgtaaggtgttaaacactaatagtatgtaaaatctttagtatagtgcctagcccatattgagtgctcgataaatgtattaatattagattgcatcacaatgtatacattgatatgtctgtctcccctgttgaactgttatctttgggtacagaaccttgccttagttaattttgtatccatgggatcttgaacggtgttgtctggtgcagaataaatagtcaagatttttaggagagggagaaagagaaggaagggaagaagggaggaccagttatgcggtgcagctgagcgccaacctaaaaaattaaagacctgggttcaagcttcagcttttccatctactggctgtggagttctaggcagttactcaatgtctgtgaaacacattctctttatcagcgaaacaggtttgctaatactgacatcatagcattgctatgaggataatttgagacaatgtgagactgtttgcatattgaaatgtactttacagatttatacaaatcatcattgctatgagaagacatgccttcactgtctcccttattttaccagataatcagccactttgcagtgactccatctatggagcagaaagcaccccgttaggtgctgtgaggaggcctttgctttcaatatgtttactatgcagaagggaggttagaatccacaacctccactcacagccatggcaggtagcttgagagaacttctggctgggagcctttgacctccactgacctacctctccgagtgcccagcagcagcagtctctgaagtgacccctaatacggcatgcacatgccaggcctgctcaagttcatctttggaatgctgtgtcctttgtcaaatgtcaccagcatcattttctcatttccctcatgacacacattttaaagcagcaaagtgtattccccatgatgtaaatggtacagtggcagagagtggagacagagggtgccctaatgccagtggaagagaaagtcagggctgattcctgaccgccacttccccgctctgagcaccgcatatagggatctgctctgagacctttatctttaccttcatacagagcttctccttccttacgtataaatccccaaatgtataggtctgggaacctctagagaaacacggatatagagaaattcacctcagtgcctcttattcttcatcagggatctataaagctttttcaatagtaaaagcagctccttttaaacactccctgaaagcattacctgatttcctcacatctaaatccacatttctttaacctactcttttcatctaaatgagagctttaggtggatgttgagcctccattcttaattctggaggcttgggtttctccagaatgtttagaaggtttggctcacatgggtgttggtattagtttcctattactgcaataaatattacacaaacttagtggcttaaaacgacacaaaccaaggttttggcaaggctgcgtttctttctagagactctaagggaacatccattttcctgtctcttccagcttctagaggttgcatgcattccttggctcctggccccctttcattttcaaagggagcaatagctggtcagacctttctcaccttccgtcactgtgacactaaatcttctgcttccctcttcagcattaagaacactttcaattacattgggccccactggataagccagaataatctccttattttcatgttacctcactagcaaacttaactccatctgctaccttttgccatagaacagcacatgtttacaggttgcagggattaggatgcagacatctttaggagagtgatttcaggatctcaaaatttctctatagcaggatcaacaaactacagcccatgggccagccacatgtttttgcaaataaagtgttactggaacacagccatttgtttatttatgatctgtgatgaccttcgtgctaaaatggcagaattgtttgcaacagagaccatatggcccacaaatctaaaatatttattgtctggctcttttgaaaaagtttacctctgctctgtagcactttctgtgtctttggttctgactgtgactctttagaacatcactcacaaccttgtggatatctgcttcatgttttaattacaaccccaaccccactttttaaattctagcagtgttctgcctgcctctccagcagttcctcctctatcatcaattaccataaaattatttatcccttgtagtaactccaagcaccatagagtgttaagtctctttactttttccctctgcttaaaatgcacttaccttctttctctatctcttgccaggcaagctcctatttatcctttaaaaccgtgccaatgcataacttccaggaagccttctctaacatgcccatccaaggagaagtactctactctgaaattacttctagaattctagaatagaattacttctactctcaaaacagtcttgctggactgtaagtgcctcagtggcagtgactgagtgatttacccttcttgttgcccctgaaccttgctggagaaactggttctttctatttcgtggagggaatggctcttttcttgaagattcacttcccttctcctggcctcagtctcatcatgtgtgaaccaaagagttggattaaatacagtcagtctctaaggtcccttccagattcaataatcctttccatcccagaagatttggcctggttccttacagatgctgaggagaaatctcctgcattaagcttgcaccctgcagagttggaaatcatccaaaacatttatcactcatagctttgctttgactgtgtggcaactgggaactgaggaaatgggggtagagtgactggaagagaacaaggagttgctgagataatttgggggagatctcttgtaagtatttggccctgacctttcttcaggaaccaatgagaaggcagcacagtggcctggagagttgtaatccttcgcagcaatccatgcctggggctcctccacttgttatggatgcaccctaaatccttgcaaccacgtgggagtcaagacaaactcaatgtggtccaaattcacatgtctccccctcctcccctaactccctcacatgtatcagtgagggagtttctgctcttgtgtcccactctaaggctttgtgacaattttggacacaattgtcaccctttgtgatgattttggaaactcgtctctccagtcctccatatcccatcccttaaacatatactttttccttccaaacattgcttagaacttagctcttctctgttatcctattgctaccatctattctagcctacacaggtaatcctgacagtagaatcttccccaggttcccaactctagctacttcccattgagagccatcttacatcctcctgccagcttcatagttgcacattccctctcccctcatgcctcacccctattcaagaacctacaatagctccatgcattcctgcatcaaatccaaacttcttggtctcatttcgtaatctggctccactgttttttgtttttgttttgttttgttttgtttttttggagatggaatctcactcttttgcccagcctggagtacagtggcgtgatctcggctcactgcaacctctgtctcccaggttcaagcaattctcctacctcagtctactgagtagccgggattacaggaacccaccactatgcctggctaatttttgtatttttagtagagatggggtttcaccatattagccaggctggtttcgaactcctgatctcaggtgatctttccctctcagccttccaaagtgctgggattgtaggcttgagccaccgtgcccaacctccactgtgttttcatcactctattcagtgaaacctatcttgtctctgcttcacatttcattttggccgccatgccattccgcgtatggttaccgttgcctggcttgtaattcagcttaattcagtgcattttcacaaacacttatgaagtacctgctctgtccaaagcacaagcacacctttgctgctcccagtccttctctgatgatccaactgcagtccatggtttgcccttgctgttttcactttgtgtctatgcactcctcccctcctggagcacattccttgaggacaatgacaactgtgtctttcactctcgtacttactgggacctactgttaagtccaggctcccagaccacctttacccatacatcattctcttcccacttgttctgtcatctataaattaatgataacaaatctatctcacaaggttgttttgagtattagagatattttgttcagggttgactatcagttgatggttgcaatgattagcattatttttatatccatccccttagggtctttcagtttttgttgcacaagctcttaagcatttggagttagagaaagtaaaatgtgttttattactattaaacatagaagttatttctgttcctgagtcttgattggaaaattccacactcaaccccacgaattactgtaggttaatgcatctaatttcacctgttcataaggcaaatgtttatttattttattttttattttttggaggcagagtctcactctgtcacccaggctgagtctcactctgtcacccaggctggagtgcagtggcacgatcttggctcactacaacctccgcctcgtgggttcaagcgatgctcctgcctcagcctcctgagtagctgggattataggcacacgccaccacgccgggctaatttttgtatttttttttaatagagaccggatttcaccatgttggtcaggctggtctcgaattcctgacctcatgatctgcctgcctcggcctcacaaagtgaaggcaagtatttattaaatgcttgctgtttatcaagcactgttcagtccttaccattagcaacttcagtggccttcttttttttgaaggtgagtcattccctcttcctcatctcagacccagccctccctacctacgaggaagtgtagtatgggaactgtggaattcagagttttcactgagggcttggttctgagccttggccacgtaaacctcactcactctccaccctcctgtgttcttctgaggctgtgtctgctgggtaccagctagagccttctgtctgctggctacctagcctattcagtttcagaaaaataatttctaatccaaactacaactatttgaaatccagtcagagtgtagcagtaattcattcattcaataagttcaatcagtgagtaaattcaatttagtaaatgattgctaaattaaagcaatcacccagcaaggctgattcaacaatctcaaaatgtctgctgtatgtttctgcaacgaactttgtagtgtaatctcttcattaaaagattaatattcccttgtttactactatttcaaataatacaaattcacataattcaaggaaatcttccaaactagataacatgatattatatggtaaatgccagaagaaccagcaaaacaaaaaacaaaaacatcaaaccttcactaatgagaaaacaacctttaaaaattgccttaggcatctataatctagattatcccagttttaagactttgcagaatctgtgtctagttgttatatgtgtgaagctggcaacaagaggccaaaatatcagaagtgacatgcaaaacatttacagtcctgtctgtatgtgtgtgttcagggggagattgatttaagccaatattttctacctagcctgcacatttatgttggcaggatttcactggtaaatattggtctaaaccaaacactgaaatctttaatcacatttaaacagacattgcattatactgcattagacactgcattagaaaggaaccaacagggaaaaagtaagcacagctgatagctacaatctttcaagggtaaaaaggaaaaatcagaattcagtaagagtcttcagagggagaaatgccaagaaaaccatagctgaaatacaaaattttgtttttctaaagtctggagctgagttcagttaagtgacgtagtttacaaaccaggggaaattagggccggaacggaagtactgctaaattaggagaaattggccaaaggaaagtgagctagctgtgacatacacagtgttggcttctttctctcattctcaaacaattcttgtttgctactgtgtggagttgggttgccatgaaacctgaggcctaattttatatttcattggaagttctgaatctgtcacataaagcaactgtttgtctacccacagaggctgcaaaaatcataactgttaatctttcctaacacacacagaaaaccccaacccaaaaagagttgcttggctttctttgttcagtgtcttcattcacatccaggggttcttactgaatcatccagaaccccataaatcacctcaagagcctgtgagtctcctactaaagtgttccttcctccatccctcaccacctctgctgcaccaaaccctaccccgcacacttcagacacagccctagactgcttagatgcttactaagaaagtctttaggaggaagggctgttttatctctgaaatctatgcttatcccttcttaattaaactgtcaggccccacattttggtgtagatgataagatttgagagaagcagggatcttgttgggatgaatggtcagtcccactgaagggtgcctcaaagaaaaactgtttttttttttaaatttcttttctttattattatttttttaagtcaggcctagtgcagtgcctcacacctgtaatcccaatactgtgggaggccaaggtggcaggctcacttgagcccaggagttcgagaccggcctgagcaacacagcaagaccctcatctctacagaaaatttaaaaatcagccaggcatggcggtaagcacctgtagtcccagctactttggaggctgatgtaggaggatcacttggcctaggagttcgaggctgcagtgagccgtgatcacgccattgtgctccagcctgggtgacagagtgagatccagtctctaaaagaataaaataaaataaaataatttatcagctcttaggcaagattgaggaggtgggactcccaggaaaaaaaatgttgaaggactcattgtggttattgccaaacctggctgaggatggaaatcacctgaagcaattctaaaaagaacaaattcccagaactcagtctgccaagactgctttatacatctggggtttagcctgggaatcacccccaggagattcagatgcacctcttctatagactggtatagtgatgaatatcaactttgaattcaggctggattagaaaccacgatctaatatatacttagtgttgtaactttgggcagattatgtaacctctctgagcctcagtttactcatctataaaacagggataataactatttactgggggtgtggcaaagattaattaaatattatacatagtctctcacacactgcctgacttatggtgggtcaaaaataaagttaagccaatccaaatgtctccttgagactcacccaactgagatagcccctaaggcattcctgatcacactggaggcaaactgcctcagtctgaatccactaagtctgtgattctggaaagttactgaatattagcaaaaaatcattatttttattaccacctcttttaagacaagcaattatggtggaatgaatgctggcctttgagtgttcacgtcctggctatagacttatgacctagaatagtgcttcccaatagaaatataataaacactctacaggtaatttaaaattttctagtaaacacataaaaagaaacaggtgtaattaattttattaacatattttacttaatatatgcaaaatagttaacatgtaatcaaatatatgcatttattgagcaatttacatcattttttcatacaaagactttgaaattcagcatgtatgttacacttacagcacatctgaccagagactagccacagtttaagtactcagtagccacatgtgactagtagctaccatattgatagcacagtgtagacattccagattctaaagcaagtcatgtcaccttcatgagcctcaataatctcatttgtaaaaatggagataactttaatggctttgtttgcagaagaaaatcagtaaacttgaaagcgcatgtcaactggtaaagactgtatataacaggttttctgctctttacaacacttagactacaaaatacaatgcgattttcataaagtgatgtatccaaggtcgtgtgtgatctgagacatcactcaggatagcatcaggcagagacactctcctctaggcagatgaaagagattttagctagtagtgtttcaagaggttggaaatttcttagtcctcttctcctcctcacccagcaccttcactctcaacagcaaacacatttgcttctactcttcactgactcttgaaattccttcgaccattttcattctacaaataaagataaaattgagggataaataacccttgtgttccctctgataacatcttaatttgaggcctccttacttcttaagctcctatctttttctacaaatgatattctctgatgttaataatttaccaagtgcttattctctgcactcttataatttttataaaattctgctaccagagcaatagctcatcttcttaaagattgtattgtatatatcaagagcactgaacttggagtcagaaagcctagattcaagtttccaggttctacattttctagttatgggatttgaggtgaagcctgtagtgaccagaagacatgaaaattccctgagcttcatcaggcttttcctctataaaataaagacaataatacctctctcgaaaggtagatgaggattaaaagagataatgcataagaaagtggtctataactgcaaagaattagacaactataaaatggtatttagggatttataagccattttgtgcatgctattcttccattgagcagtttccaatggttccttcttgcctgccaaataaagtcagattccttaatctaacattaaaaacctctccaaaatttggccctgaccacactacttttggaagtttatcctactcaacccacttactcaaatcaaatgttctaaccaactagaactctcatatttgtcctacccaaacaacactgaatggtgtgacctatttctaatttggtatatttcttaatgctgtccattgccttacctcattttccaacctctcaaacttccacccattcttctttaccaggcctccaaatctctcatgatctcgttttccctcatgtccttgaactctatctctgcagcctctgaactttgcttgtgtctttcttatgacagctataaaaacccacgtgggattctagtaactcttggtgcacagagacttgcaacaagatgcctgaatgtgggtactcagtgagagttaaatatccaaatctgcaagtgattttgcagaagtgctattgagaggcaaaatgtttcccatataaaaactagccagcctagaaatctaatcaacacatgaatgcaaaagaaagatagagctgattagctgtggtaacactgaataaatcagtaaaaagaaggtgatttgtttggagactagcaaaaaaagaacaaaggacaagtattggacattgtgtctttgatactgttcagtagcaaaggcccctttctttttggtaatgcatagcccatctgttgatatgttgggcatgtctacatttcaactaatattttctgagcttctactaggtaatagatgcttgatgcacaaaaaactaaaaaaatagattctctaccctcaagaaggttagaatctaatagatgagaaaaaccaagagaaatatttgtaatgaaatatggtcatttggaaatagaggtttgcatatggtgttgtgagatcttagaggaaggaggcttaatccaacctcagaatatttagaaaactttgtagaggagatgacactaggctgcatcctaaaagataaggaagagctagccaggtgaacaaagttgggaaaggcattttaggcagatagaaatgcttgagcagaaacaactattatacaatctatctcagcaagggagctgagtatatcaggcttgaggaaaggagccatttaaaccatccaactagttctcctgctctgatttcatgcttaccaagccatcttatggttagaatttggcctcccacatagggaaacatgtgattaccagaagacataaaaagctttttataaattactgttctctattaattcattggactctgatttgccactgggctcttgtgagttgaactagtataaactgaatgaactcaaaatacactaacaaaattacatttctggacctgaaaggctgaagtgacttgaattttggtcatcaaccaaattccaccaccttagaggccatgtggttctaacttatgaatgtttcaaatccatttacctctcttcatctccattgctattacatggttgtagctatcatcatctccagcatagactgctgtaataaagaagtcataatgccatcttagtccattcttgcttctataacaaaatatctgagattaggtaattttcaaagaggagaaatttgtttctcacagttctggaagctgggaagtacaaaatcaaggcattggcaggttcagtgtctgaggagaactgcactctctgcttcaagatggccccttgtttatgtgaaggacctcttcaaggagaactacaaaccactgctcaaagaaataaaagaggacacaaacaaatggaagaacattctacgctcatggataggaagaatcaatatcgtgaacatggccatactgcccaaggtaatttatagattcagtgctattcccatcaagctaccactgactttcttcacagaattggaaaaaactactttaaagctcatatggaaccaaaaaagagcccgcatggccaagacaatcctaagccaaaagaacaaagctggaggcgttatgctacctgacttcaaactatactacaaggctacagtaaccaaaacaacatggtactggtaccagaacgcagatatagaccactggaacagaacagagtcctcagaaataacaccacatatctacaacctctgatctttgacaaacttgacaaaaacaagcaatggggtaatgattccctatttaataaacggtgctggaaaaactggctagccataagtagaaagctgaaactggatcccttccttataccgtatacaaaaattaactcaagatggattaaagacttaaatgtaagatctaacaccataaaaaccctagaagaaaacctaggcattcaggacataggcatgggcaaagacttcatgactaaaacaccaaaagcaatggcaacaaatgccaaaatagacaaatgggatctaattaaactaaagagcttctgcacagcaaaagaaactatcatcagagtgaacaggcaacctacagattgggagaaaatctttgcactctacccatctgacaaagggctaatatccggaatctacaaagaacttaaacaaatttacaagaaaaaaacaactccatcaaaaagtgggcaaaggatatgaacagacatttctcaaaagaagacattgatgcagccaacagacatgaataaatgctcatcatccctggtcatcagagaatgcaaatcaaaaccacaatgagataccatctcacgccagttagaatggtgatcattaaaaatcaggaaacaacacatgctggagaggatgtggagaaataggaacgcaaaaaattcctgtgttgaaaccagtaggtttcaacacaggaattttggggggacacatttagatcataacaaatgctaccagcaactaggatggataattaactaggttactaggtaatgttttatgtgttttggtatggtttacctcatttaatcttcataactatcccacaagatatgcttacccccattttagagatgaggaaattaaggcttagagaaattgagtaactcaaatggcaaagccagatatcaaactcgtgtatgtcttcctgtagatatggggctcttgaatactatttagctaacctcatatttctagtctctagatttcattcttgccttcaagttcattctccaaattgcagccagagggatctttttaaaatccaaatttggctgggccactcctttgaaagagctccaccaagttttccagttgcttccagaataaaatacaagatctttgcatggccttccatggctgtatataacttgatctagcttctcctatcagtctttccctgtctgcgttcatgagcatactctgatgttccccttgcctggaatactttcctctcccttgacacttaattcttattcctcaaaatctcataactttccaaggcaggccttccttcacatcccacttttcagattttgggtccctggttatccctattataaatgtttatagcattctacacttcttagtatctctgttccaagttgtactaagtttttgcataattatttttctattcctcttaggatataggcttcaagtaagcaaaacctaatattcagcactatacccttagagtttcatgatgtgcctacaacataataggcactcaaaaattttactcattaattatttatcgtatcatattcaataaataatagccaacattcatctggtacttgtaatgtaccatgcactgtcctaagcactttacatttatttatttgttaaccagatgctacagcccattaaaatagatactattattattctcattacacagatgaggaaactggggcacagagaagtaacatcttatgtaacaaagttttataacagtaagtggtggtactggaatatgaaccaaggcagtctaaccccagagaccaagcttttaatcactgctctatatccttcataaatattttgtcaatatatttactttgttagaaaaataattggacagcagcttgcctctatccctatcactttcttgtgtcattggtcttcaataccaatacaggtagataattaagttctttgaacatcccttcacattggtggtacatgttttagctggatgagaacagattctcgttagcatataaatgccaaaggcagagttctggagagcaggttttcctaagggtaaggacattaaaagagtgggaggtagaccaaaaggaaacagtgctatgaggctggcacatcaaagacatagttttgccttgactaagcctatctctgtaaaagaaagagaaacttagaccatttatttataacaggcccagtggtttagcaaaaaagttatggaatttagaatcaatatgtcaatcaatataattaaaatgtctccttcattctccctccttttcccatcttcccctctcaatctctctgtccttcttctttgcctccctccctcccagccgcatcatatcactttgagcaaattgttaaatgcatccaagcctcaattttctcacattcataatggaaaatgtatgtcataatgataataatttctctcttggggttatttttcaaggaaaaaaatgagatatgcaagtgaaagtgcttggtaaactgtcaagttatatatataagagccagttgtgattagaagttttgttttacttgtagtcttagaggaatttgctaaagagatcggcatcaaaatgacctacttttcactgttatttcccttaagggcagtgaacctcttcttttatgaatccacccagagtgaaatccctgtcatatgcaattgcaaagttccatatctataaagacatgctaacaaagttctgcctaaagaaaggctatatagggcttgcaaactttggtcttggaagaattgcattgcagtgtgtacatgttctcctgttcttatgatttgttccatagatactttacccaaggttaaaataacatgccctcttgaaatgttgcactctaacctgagtgtgcttcatttaccaaatattatatatttggacataataactcatgatgaagaaaaattatatctaactctaagggaaaaaatcacaaccaagattgccaaataaatagataaataggccagtagcctcaacctaacacctttgcataaagagatgccaattcctatatgtatgaaactattttacattttatcaagtacttattgcactatgggaaggaaccgaagaatggagtaagtatgctaacttaaaggcatgtagagccataggagcaacccaaacgtaagacatctacagggctagaagcttgtgaatgaagctaaaagtaaagctgaatgtaaataatccaattaatacacacttctcatttacaaagatcagaagattatgggaggaagctgagaaggcgcctagcttcacagacttactatttatacaaggaaaagggatttccaatataatcattcgctacaatggacaataccactcctgaagtgtattgttcattgctgtaatccagcacccacccagcagcaggcttggcacatagcagatgctcagtgtacttttgctgaatgaatgaacaaacaacttccctatacaattctccacatctgaaaggccactgacctggtatgtcagttagaattttgtgaaaaaacgatccatcaggtcagctctatattttagaagtggaaaccaacagtctctaacttaagacaaatgtcaagaatgcatttttctgaagtcctacagtgggaaggacgctttaggatttcatggccaaccttacaaatgcttcctttcccagggccaaatcaaaactctgtcaatgactcagctgtcaaatacatgtcaatatatcatcaggaaagtgacccaggaccagagaagtggtgggaaggaggggagaagttcctgacacgtgccggatgctgtaccaaaggcttggcgtatactgattcacttaattctcacacctagtttaaactatcttcctgttttacaggtgaggaaatggaagcacagtgggctacttttcttgtctaagggcacattgctattaaatggcacagttatgatttataaacagctggggcagactctactgtgttccactgaattttgagttagtagggcatcctggtctatgtcacattaaaaccaacatttgtcgttgttttttagctatgtgagatttactcaaactctgttgatacccattgttatagctaaacaaaaggaaaggaaatgttttttagaaattctgctcttgtttttttaaactgggcttcccctagatgggactatctgttgaaagcctacatggacaaccagaaagacagcaaagtgcacaaatcacaagtttagaaatcagtgagttcttataaagtgaacatacctatgtaaccagttcccagaccaagaaatagatcattgccaaccctatagaaagcccttcaagtccctcctggtcactaagcccacaaggtagccaatatcttgacttctattactatagattagtttttgcctctttggaactttatggaatttgacccatactattttttcatatacattttaatatttggtttcctttgttccacatttatgtttatgatattcattcctgttgctgcatgtggcaattggtccaattgttttagccactagaataactttgcaaatagttaccaccttctctaatagaaagggagtccaattatgtgaggcccataaaggttatgtacagctcttttctgtgtgctttctgtggatagaaagtgtgggtgacttgacagataagtttctgatatatagagatatgttggaatatcatttagatataatttataggaaatttatatttgggtaatattgtgatgctttcaattgctaatcatgtgtaattgagggcagagcattttttcctctcagcctcagttttctcaactgtattacaagccatgagacttaaggtttcaaagttaaatgatgccagatacataaagggcccctgtgcctacttttccaagagatcagtgtagtcataagattacacttccctgcacagattgcagggccagcttttagggcacctgaggtctttcaccagtggggccactgatttcataactgctaaaatgtgtccccatgttttctaactatgagcaactagctatttgtggccaggcagaggtttctaattaccctttcctgtcactcttctctggatctctccctcttcccaacaggactctgctaactcacacacccatttctactagattggcatttaaaaagctggggaagttggtctatgaacctaagtattagattaactgaaaaatcattgaaacagaaaaaaaataaaaagatcattgactgaaaataagaatgttgctcagcagtttgtacaatgtgatcctatttatgttatatacatatgtatgtttacacagacacacaaacacatacatgacatgcacaaaggagtcaacaatggtgatctctgactgctaaaaatgtgagattttttatcatttgaatttttggcttctctgcaattttctatttttctaaatgtgcctatatcccatctgtaacaataaatgagatatttgcaaaatatatttaatactaaaaggtttacagtccatttttgtgtttattctctgattctacctttcccatgagaataggatatttttcttatcctcattttagagataaataaatttagtcttcgagaacataggtaatttacccaaggtaacccactgaagcaagatgcaggacaagaaccataccaggtcttctgagtaaatattgcacagcttccctgtgcattaggtagatcagaaaagggaagtggagacttcagaaatgacaacatttaggaaagcagttatgcaattttaaatggaagagatccgagggtaagatgcaactttaaatgcagcattttcaggaataggtgcatctttcagtgctaaactgaatcctctgtttcatagaccaagatatagtcttgctaggaatctggagggaactatttgctctaataatttaatctctgatttcttagtttatgccttaaggtaaataagataatcatcctacttccgtatctatcacacaaagatgttgcaaagattaacgaatagtgtgctgggagctcctttgagaaaagagctatttgaataccatatatcattagcagattaatattataattatttactaaatttctcttcctgtttctcagagtcaaatgcaatacccagcaaacttatagaaggaagaaaatctttctgtgccactcttgttggagtgaaagagggaaagaagagagcaagagaagggaggttggttctccctacttcttccctctggaagtttttgaaagcgaagttcaactgcatgaccatacatggtcccatgacctactcttactgcctctgagatttgcttctgtggtgttaaacattgtttcttttcagggccatcttatgtaagacaggaagagacccagtttcatgggcatgtaacctgttgggttgcacagggccctatgctcagaagggctccatatttgccatcttaaaacttgtaataatactatctttgaacttgtgttttataaatgatgtctgatgggacaatggagtatgtgccagtggcttggagccttggctcatgcacttcctcacttcctgtcacctgcctgtctccctggacaagatcctaaccatcctctcctctgctcgctggtgccctaggaatcgtccagcttcctttttcccacctgcacttgtgaccattgctgccctccatccccaatcagggtataggcacagggagggtctgagttagccacatgtgctttgtagcctcagatgggacatgttagcagccgtctttgccctgggctggcatggctgtggtagacagaggccaggtcttgatggggatgaacctcttgtccacccctgtttcaggtacccagcatgtccctgctaagaggttgcagtacccttagcagtatgctaagatccaaggggttgtctgctgtggataggggcttggggaccatgagaagggagaaatacctaattcgacttccccagctcttgtgcctggtggggacacagcttgtcagtctggcggctatcaggaaggagtagccagctgctggtgagctatgtgcgtgcccttagtcataagaggcagggccttcaggttgctgtgagggtctgcactcacctcaaggtatcccagtgcctgaaataatacaatatttaaacacaccaaaccattaattgtgacaagtgtaccataataatgtaagacattaacaatggggaaattaggatgtgggatatgtgggaagcccctgtgttatctttgcaatttttccgtcagtctgaaagtattttaaaataaaaagtatatgaagaaaaaaccaccatgacaagttgaaagagagaatgcagaagaaaggaaaaaactttatattttagtatcttttatagcaattttactgctttttcaacaaggggccctgcactttcattttgtactgggcctttcaaattatgcagctgattcttactgtaaaatcccttattgaatgtgcaattcagctatctctctttcttttcttcctcacactcttttctacccttcaatgccaggccttaggatttctccaattgccattagtaattctcctatgcatctatcacctactaagaactggctaccatcctaggcacttcatatattttatcttatttaatccctttataactttatgagataaatattttatccttcttctacagatgtatgaaattgaggtctaggaccacacagtaagtggtagaagagaaagtcaatattcatgattctcactccaaatctggtgctttttttcacagtgctacagatggaccattcagccttcaggtgcccaggtatttgtaggatgcttaggcaatttggtttccattcctccaattatttactgagtatctcctaggtgctaaaactacaaagttatatcagggaggccagtcctgcgctgctctggtcattttctttgattgcattcataggtagcaggtgtttgatatccccctatttagtacactctaacctctgtgcccatggcttagttgccatgataggaagactataaagtggacacaaagtcttgactgtgaattaagaatttggaaagtgatactctagcctaactaacattgcttcaaaatgtattaatttttgcttaaacattttgatggctgatctgaagaagagaggacaatggagcaaggtctcttcatatccattacctgttcacccacatctcacgttgtaccaactctagaagtacctgagtgcttgttccatgcagtagacaatgaatgagctcactggtgtatctttgaagagtccttctcttttttgtacttctgcgggtataattactgtatgtatttccttggtcaagcttgaatagaaatcagatcccttttttcctctgcatgaaggagaaatgtgatgtatcatcttgcagtcattttgcatatcagtggattcaaaaggctaggagcaagctactttctccccaccgtcctggtgaatgtccaatattagttacagagaaccacaggttgtgatgtggaagacatgaaggtagtaaatccccagcagctgggaagtggttggactttttcctttattagaggcagggaatgagaatgggagggttctgtctcttcagaaaaggcttccttggaagaagtgctcttctggaagcaaacagaggaggcaaggggttgtttcggacacactagagagtaagtcagagaatcttcgtgttgaggcagcattgcaaaattgaagatgaagaaaggaaggaaggtatgtgtaagtctggcttgaaatgagttttattaaaaacacctcaattcttgtctgcacatttttgaagagtgtgaaaaaaaaatggaggaagttacctccagtggttttgtggctttttaagcatgacatacaggatattgaatttaacccctgtttatcttgaagtgtatgaatatttcggggataaacaaagcaactattctttgaaatatgcgtctgtggccaagtgattccagttacttggaatcacagttctgttgattctcttttctgcttcaagtatttgcacaccacagacataagattattcatataataatttttaaaaaccatgtggtcttgctagaatttctgtataaatgtataaaaatgtcttttaaatatggcaggaatgttatattagaactccatgtgagattttacattttattagtgcctattgtgtgtttgtatttcagaaatcttggtagagtttataaatgctatttctctcaaaaacagtcgtgtatataggagagtccaagtgctttttacaactctctgtagcttcattaattcatctagcatttataaagttatttcagtgcttattaagatagatttcttaagccagtaacctgaagtatttgtttagattcacaaacttttggatataaaatgacatgttaaggatatgtaaaaagaattttaattatctagcaaaaaaatgtgattttcacaacaatattttttgtgtgaaataccaacaatatttccagaaagtctagagtcttagggcaacaaattggagcccccagctttaatcaaaataaaaatctgcagagtgttcacatctggctccacctgaaagtccggttcagaatttccctgtgatcctggcacttgcagaagggaagttttagctttgtttagtataacaagagctgcaggactcccaggccaataaacgtgttcacgtaaaactccagacagcttcttttagactggagtcttatcagggagacctcattttccctctaattaaaggaaagatttaagggagagaaaggaatagcctatgcctcttacttgtgcgggtcagtgttcgctgaattagaagttattccaacatgaacacaatcctcaggatgaatgactgcctagactttgaacgtaatggtcaaccagttttcacccgaattttgactgtttcatttagaagaaaagcaaaatgagaaaaagctttcctcatttctccttgagatggcaaagcactcagaaatgacatcacataccctaaagaaccctgggatgactaaggcagagagagtctgagaaaactctttggtgcttctgcctttagttttaggacacatttatgcagatgagcttataagagaccgttccctccgccttcttcctcagaggaagtttcttggtagatcaccgacacctcatccaggcggggggttggggggaaacttggcaccagccatcccaggcagagcaccactgtgatttgttctcctggtggagagagctggaaggaaggagccagcgtgcaaataatgaaggagcacgggggcaccttcagtagcaccggaatcagcggtggtagcggtgactctgctatggacagcctgcagccgctccagcctaactacatgcctgtgtgtttgtttgcagaagaatcttatcaaaaattagcaatggaaacgctggaggaattagactggtgtttagaccagctagagaccatacagacctaccggtctgtcagtgagatggcttctaacaaggtaagagatgatctttttattcattaaagtgtgatcatgcagggagctccagctcccctcacccctgtctgcagcagagtgcaccagggaatgctaccaactctaagaatatgtttgttgctttgtctagaagattctcttccaaagtgtcacactctacttgtgtcttgatgctacagcaaaagtttaaaatcctcagtacgcttcaatttccagaaacaaaacttctctcttactgatgcagtttggaataggtttaaggtgagagatgtctgtctgtaaagcttccaaatcaatataacattgaaagtgctttaaaatttttttacaattatcaggaagctaaaatctgagttagtcttgttgcattgcaatcaggtgtcacatatttatttttaaacaagaaagtagtttaaccttcatatatcaatgggaaagaatggtctgtgttgaagtttgataaattccctctaaaaagaaggatatcctgggattttctaagatttcttttgcgatgctggcatgacctaagataaaaaagaaacaatatgctttgtctccaaaaccagaggttttctttaagtttgctgattttcatagtgaaatcatttgaaattgcttcatgcatactgcccccaaaatggttttatttacaatccccagacaaagcttaatgttgaagagccttaattatctatcattatatcatttgtttaattaacacctggacttagaatgctaatttatgtagtgagagttgttgctttttgtttgtatttttaccttggagaatattatattaaatacatattgctataaagttatacaaagttatatatgtgtgtgtacacacacacacacacacatacactttgttaaaaagccttacaccataccctcataggtgcacatttcagagtcccagtcattctagcctgaagtatcatcttgttgtctacgtttctggggctgagaagatattttgctccacacctgccagcatgccctttccagccctgaggtgcaccagtgagtgtgtgtcccttctccagctttcctggggtaaaagtaccacctttggatcaaggcttgctggctgcggctcagaggatctgcgcagaggaagcagtgtgtcctcaggagatcctgaaggaggggaggggggactcttcctacttggaactctttgtttattggttaatgaaagggcaaaaataagtccctttctaaaattttagtttagagtttaagttggaagggaaaaaaaaagaaaagaacacatttgaggattaactatttattgacttttctctgaagttctcaattgaaggttaaactcagggattttccaggctggggtaaaactcaaccaactgcttccccatgaggagggctttgctgtgtaacttctccaaatcacactgggactccatgtagaaggactttcacaaggcttgagcctactttggagcattagcagacactctgttccctgtattttgtggtaattgacggctatgcaagatgtagatccaacatttatggggtagtttttcaacagctttcaccatagagaacatggcaaacttcaatagtcaccaaaatatactaactagagtcaccaagataaagcaggcaattaactccaagaagagaaaaagagtaccccctgagaaactacaaattgccattaattttcattttgagtgtcaatatgctgtagtattctaatcccattcatgcctagagtgctggaattagacattgactgtcttgcaaatttattaaaaataatcttattcagcatagtagttagtaaggctctgagaccaggcactctgtagacacgggtgaggattccaatccctcaggcttccgctcctcctttatggtgttgtgtgcaggaagcaatgaaagttgaatagagctaaccctaacaaaagggctaaccttcaatgctgacacagttagcttaagtaaaaagcatgcagcctcagtcattttctagttctacagtggaaaggttgtcagggaaagcaattatttagtgcatgaatgatgcccaactgacagctaagattaatttttaaaaatatctctttttactttactacctttaaaaaattattgattattcagataattgtctcaggttaagcttgagcataacatgcaccatgacacatatgatataaggcaatgaggccagggagtggtggctcacgcctgtaatcccagcactttgggaggtcgaggcagcactttgggattgcttgagcccaggagttcgagataatgcaatgcaaacatttttgtggccaccagaaagaaattgatctacaccagttctttgggaactgaattatccatggcaaaaaaaaactatattccatattcagttttcaatgttgctgaaattatctgagatttccatccaagttgacatcttaaaactttatcatgatcatcactccctttactatgtagtcttatttggccatattttgcttacccttatcaactaaggagccagtgtaaatctctgagttgcagatctggaagtgatgtgaagaaatgttatagagggagtgtacttatcagtggtatccactacatttttgcaaaaactctgtgttcctagttctgtttcagctacgtggccactaagttttgtttgcaatgtctgatcttaagaacagcgataggtgaaattgtgttatgctgaggggtatttgggaattacataagtgcagtctacatgcaactggtagagagttaactgtgtttggtggaggaaaagcaagcatctttcatctttacttcatctaggtagggttgtgcttttttagtttgtttgttttccttaatcctttaaattttgaagaaaactgagtgattcaaatctcctaaaagactttctcaaatgtacttcatagcctagagagttagctaagaaacatcgtcctctgtttggcccaaatttctctgatcccttaatgctggccacagtccagatggaattccagaattttagagaatggtgctgccaggtaggttagtcttgtaaattattttcctccaagaattactagaagatggaataagttcagcagaagttttacaaggcaatggtattgttatttaagatgaaaaggatggctagtgaacctcctgccagctgcccaaattcgattagacatgttagagctagccgttttgcttaacaacagattgccttcttagaattgttcattaattttgtgtttcaattttcatcacctcctgaattagaagaattgtcttacacttcagcaaaatgcatcagagcatgagttcctcagtggcaaaacagtcagatgttttgaaaacaggatgctttggctctccattataaaaagaggaacggaaagagaaacagtatagaaaggaagaaagcaaatagcctcagcagggtccccagcccaacaacggcataaacagtgacctatcttcctgaccttcactgtggctcagttcctgacctcgtgtcaccaaagccaaccaacgtcattagaggaggataggaggaatggcgcagctgctgtgagggtgactacaatttcctgtctccttcctgacagacgcagtcagtaaagtacagggttgcaacaacagtggctgaggaaggaccaacccagaacaatcccagggaggcgtaattgtgactggcggggaatggggaggtgttccttccctcattgtactgagaaacctagtctttcacctagaattttcaggtgaaaaacgtcaaaagggtcattcttacccagaatgctaaatgtttttcaaaagatgaacatactgtggtattcagaaaagctatattcaagcaactagtcactgtcttcacttcccccacaaacgccctccactgtccttttcattctccattggtttggctctggggctgttttatatgcagaacaaaggttgggtgctgctgggtgaaaatggatattctgttgttgaagagtggccctgtgtattagtactttttttttagaatgaagcattaggacttagcacttgagtaaatgtttgctaagatagaaatggaagatagatggtccttcttctcttaaggcattgtgaagtcggctacagataaccatcatgaggaagtgagtcctcctggctatgcaggcttatttttccagttcttcaggtgcagccatactacagtactaaacatggagcacaaaggcaactaattgccagtgctcttgggtttgcaggataaagtcacactattctaccaggccccgagccagctgggaattaggctgcatgacactggatggtgatcatgacaggctgattgccctaatgaggggtgaaccattttgtatttaactaaataatcaataactatggaaaatgccagctcctgcagaactgacaggaaatagatcttactggccaatggattcatcttagaactctgtaagagagagggtagacaggcgctcagtccttgaaaggaatattcatgccacttttgcctaaaatgtaatgatatgattacagcagtgccgcccttagcataagatgcatccatttgctgggccctgtgctgtaatcagagggccttagcctggccttccttctgctgccctccacccaaggaagtaaggagttggccgggccaagggagcagctttgctcccctctctaaactacattttgcatctgctggacccccacattctctgtccaaatggctttgaacccacttcccggccacacaagcctcttcctgggatgtgctgcaggcatacacacccttaggcctaaggagtttaaccaagaggcagcaatgagaggtgtgaagagacttgtgtaggaggaacttgggtaagcaggctgcggtccagggctcacgacggctgctcacaggtccctggagatggaaggacatggggaaagaggagggccaacccatatccaaggagttcaagaattctaaattcaacctgaccttccaggctgttatggagggatatctgtcaaggtaaaggagatagctcaatgtatatctttgtatatttagacttacagtgtgtggccccacacatgttagaggtgaccctggattagagggcagaatagaattaaaatcagttctggtagccaggtgggcactcacacatttttttggttcaacttttctctctttactgctcagatttatatagactaaattatggagggagcaaaataaagtgaaaagagcctaggaataagccatgagtttgagttctagccctgcctttacttaggtatagtaatatagacaataaaactatttggaatctttccatattctcttctataaaacaaaataattggaaaagacccagctcttcagtttattgattgaataatattagtaaacaacagaactacctttacaggtgtatgcaaacattgtgctaagctctttacctcattctgtaatcaatattcacagtaacactttgaaataggtactgttattattcctgctttacagatgagtaaagtgaggcatacaaagttgaaataacttgcttaaggtaaatcatagagccaggattcatatccagtccatctgacttaccatcaatgatcccaatgaggcatataaagaaagaaaaaagtttagagttatttaataattcttctaaggggattttggattggttggtgggtgatcttgttctttcaactgtggcaagcattattagtgaggcctagttcaaatttatattctgtagctaccatactcacagcctctaggatggccattaattgccctaagctcagtcttcttgcctgggaagcagtgtaaggggaaagagcaatcgcaattatagaaaatggttataaagtgctcataaaaatgcaaataatagtattaaactaatccattgcctatttcagatcaatttgctcacttcactatctgtttcttaaaattctccaacatagcctaagataagatagtaaaggtctgttcaaagcactgtagactaaccccaaattccctttttccctgcttctcaaaataaaaagggaaatagagataagctattcttggccgggcgcggtggctcacgcctgtaatcccagcactttgggaggccgaggcgggcggatcacaaggtcaggatatcgagaccatcccggctaaaacggtgaaaccccgtctctactaaaaatacaaaaaaattagccgggcgtagtggcgggcgcctgtagtcccagctacttgggaggctgaggcaggagaatggcgtgaacccgggaggcggagcttgcagtgagccgagatcccgccactgcactccagcctgggcgacagagcgagactccgtctcaaaaaaaaaaaaaaaaaaagagataagttattcttattttttaatttatatgatcattcaaatgatttgggcaatttcattatatgccacaacctttccaaggcatggaacatgaccataaaacagagaattaatgcttcagtaatatgtaagggaaatttttggaagtaacatgtccactgttttccttgggcattgtcttcaaataaagatgaaagagaagattaagctatttattctttgtcattgtttcagttactctttctatgacaaaatggagttgtattagtgagtattagtattagtgcaattcagtattccaagttctagtcttctcaaaacttagcaaatcaaagagtttgaaagttatttggtgctttgtagtaagtttgatttgtaatctgttttgttttattcaaatagttcttcattggttttaacagaaccatttctttactcaatggtaatccatttggcccaatctttctgcctaactcacttgaaagtcctcaagtgagcaagtctctaaaaaacaaacagaaatgaagaggacattgcctttgattgttttacctctggctacctgataagagagcataatagtctcaaaatctgataaataaatcattttaaggggagtatctttctccacattggggaaaaaataatagttatgtttagattgtcaaatgtaaatgtaaatgtagaacactagtcttcaaaaatagaattcaacccgttagcagaataaatgtttagtctccatttttttaatacttttttctcatcttttaaaaattgtttagtttttttttgtttgttttttttgttgtttttttttttttagaatatgtccgagtctaaaaggctcctaggttgtatgccattgttgtctatgaaagaaaaaccaagggcgatggtgcttgcatttgcagtattcttccaaaacatttttcttctgagtaaaagtgtgctcaacaagtggagatagctcagacatctggaagccaggacttactaaacaagaagatgccagggcaaatttgtgccacagtcaataggtttcacactcttgaaggcatggtgccagttgtcaatatgctttcctgagcatcctttccctctagcatttttcagggacctaccagcacctctctgtcttgctcacttgtacgtgatgtttccctcaagtggtgccaaactgtttagtctcttgtgtatttcactgtaacttcctttgtttgattgactttaaagtagccaagtgcttccacaaagaaaggactgttaagttatttagaaacgaagaagacagtaaaactcctgtttcttttgtttctgctttgggaagtgccagataattttttcttcttatggaatagattttaaagctataaatcttgccattctgttcaacagtcacttttttccttctgctaattaattgtaattttaaaatgtatcagttttgaaatctagagcccccaaagattgaagtttagtaaatttattaaaataaaatgtatcttcatggctcagtaactttcatcttctaatttttttagctactcaaaataattataattttttaattaactattaaatactttacatggctgccatcccctcactctttgctaacagcatagtgcataatgttttaactttaagcaattataaaaatgaaatttgaatacacatactgggaagtaaaaatgactaagccaatttttaaattttagatttaggacaagaggtgttggcatttgatatctaaaaagatagattttaagtagttgttttagaaagaaaatagtaaaaagaaaaattatcagtaaataaaaatagatttcaactcaattatataggctatgctaaagccaatcagacagggcacagtgaagtattaatttaccaactatctaatgtctttggtcactattgatgaaatttgataaatcaaaccaaaaaagatctaaacattttctttctagttatagttttacatgattacattagacaaagtcctagaactttaagcctagaagagagccttaagtattattttctatttctatttgaagtcattttatagatgagaaaaagaggtggcttttgccactaatgacaagtgaggattaaagtacctaatgtactccaaataactttgtaaaatatagagcacattctaaatgaaaagtaattttattatggcatgacttctccaaagtcttaaggtgtattagtgggattcaggtattaaagtataggtctgatcataaatctggcttactgttcatcttcagcaaaaggctagatatgtttgagaaagacatgggacattctctcttttgtttacattgacttttagacttctcattcttcatttacgtttcttgagtaaaaggtatacataagtgtcttaataatttcaagtaaagagaactaatttagtatgcctgaaaatttagtgatcaaaacatagcaagaactagttggagtgagttactttaaatgcccctggttttaatttcagaatttttaaaaaagccttaaatttttgaggcttttgattgttgtttgctttctcactcattccaatgtcaaagtttaggtagtaaaaataccctgtggttagtgtaactgcccttaacttctttctatttctttctttcctctctctgaaactgaagatgataaattggaaagttttaccacttggattgttaagccttgggttctctctgccactttgcagagctgttagcatggaaagttgaacgtgagatggtgattccagtttgaccctctccctacaccctagaatgtttctgcacaatgagccagattatgtaaagctctcacagctcaaatataatttctagactcttgagtcatattaccaagatcctagtggagttaggtacaatggtgttggcagctgccttgtaaatagtttaaatcaaataagtctaattcacagcatatagagacacatttttatgtatttagccaacttaaaatcagtcttagtatgtgtagatccctaagttagctgatactgcaagtattttgccataaaatttggataaataataaactattaatgtaattatttaaatgtcgggaaaaatcaagggaaaatgactcgaggaattgagcatcttgggataatatttattaagggaaattattccagaagatccttgagagtctaacgttagctcttttttctccataatttctaatcattatttacatttcaaagtagaacaaagtaaaagaaaattccttagtatataatgtaagaaattaaaagaaaatttcgaattcttaagtgagtaagaaagcttagtgttttggttattggaataagatacagaaaacctgaattaaaaagctaaaaagtgactgggcgcagtggctcacgcctgtaatcccagcactttgggaagccaaggtgggcggattacttgatgtcaggagtttgagaccagcctggccaacatgatgaaatactgtctctaattaaaaaaaaaaaaaaaagaaaaaaaagaaaaaaaattagctgggcatggtggcacacactgtaatcccagctactagagaggctgaggcaggagaatcacttgaaaccaggaggtagagggcagtgagctaagatcacatccactgaactccagcctgggcaacaagagtgaaactccatctcaaaaaaaaaaaaacaaaacaaagctaaaatgaggccaggccagtggctcacgcctgtaatcccaaaactctgggagccctaagagggcgaatcacttgaggccaggagttcaagatcagcctggccaacacggagaaaccctgtctctactaaaaatacaaaaaattagccggacgcagtggtgcatgcctgtagttccagctactggggtggctgaggcatgagaatcgcttgagccctggaggcagaggttgtagtgcaccaagatcgcactactgcacttctgcactccagcctgggtgctgggtgatgggagtgaaaccctgtcaaaaaacaacaacaaaaaaaaacaaaaaaaactaaaatggagattttattgagggaaaatccatttacaggctaggagaatcatttgtgtataaaaaggaaaggcacagattttttttaaaaaagagagactaaaattgttagtagctcctcttgattaaaacagtggacttccaacttcctctctaccctcaatgtcagaaaatctatggaaaatatggcttaagaatattatcatcacttgagaataaagaaacagagggatttaccctccatcttcatattccattgactagaaaacttccccttggctcaaacatgtcatcagatcagaccctgtgctatgattctgctcctaggacgccaaactgtggggctttttttgaaaccctcccttagctattctaacttccataacattttcaaaggccatcctcttacctatcttatcaattaataccatagctaacattttagttatctgggattttatttatgtctgctcagattgcaagtttgaatgtttgagactccactttccttgcaggattcgggctaatacatgccaaggaggcatagatttctttctgtttaattgtaaggatggaagtgaaaagcaaagaaagtttttgtcagttggtggtagttgatttttggtttattttaaaaagctgtctgcagttttcttgatcatttaagaaatttgttgacatggcacttttaatagattatcctgcttttaaagaatgctggcatgggtaatgacctcactggtgggcacagaacaataataaagatagaatttttttttttgtattttcagaaatttaaagttatgaaacatttttagactatccagtggcaatgtgcatttccagtatacttttgtatgatggtgagaagctagggaccttctaatgggtcactaatgaaatggactccaactcccactctggatctctcactcataatccacaaggattaatttaacctgccagatgctacccatttagcaagctgaaaggacacagtgccccccaatgcctgtagccttgtctgctgttattgctattgctggctccattctataagtgagtcagatgatttagatacatatatgtttactaatgcaatgggtagtttttcttggccaggctcagtatattatttgtgttcttgtcagggagagctaccagtgaattttttcctgctgtattttaacactcaggaactggttgtgcaaagtttatttgcatctttcttgtgcattgcatgggagtgtccttgagaatatcttgtaaacatttgctagtattgttttttaaatatttaaaaatcagtatcatttaatttcagagaatttgcttcaacttactggaattaattaaaaatgcttttgtatttatattttttcttttacatatttaaagtattaagataaagtcattgtctaatgttgtctgccatagtaaaatttgcaaactgagaaaggtcacatactgcttttcaagactctttagggcctttaatacagtgctaaaatagaagaactttgtcaaaaataaacaaaagtatgaactccttggtaggagtagattctctttgttttaaaaaagttaaatacattgggttaaaatgagcaaaatatgagctccttttcgtaaagttaataaaggaggaatagagattaggaaaaattcagaaatttccaatcactgcttttcaaatctaatcacatgatccaggacttcatttcccagaaaactctgcatctgcccgagggaacattagttatgagacagtgcagagatttctaaggcccatttcttcacttaaagtttatgtgctctcaaagcttcctgtggtaccaggatagagcattaaatagcgttattctctttgagttatagctgtttcttatttttgtgttgttagatccaatgtagcatggtaataaaacatatttgaagcatcccttcctgcatacacagcgctcttacctgtgttctcgtatgacactcaccctgaggaaggtcttattgtatccccattttcagatatgaaactgagattcgggaaagataaccgatttgtccaagtcctttacctactaaatgtcaagacatagaatcaaatcttgttctctttgctcaaaagttgagcaaagttgttctctttgctcaaaagttgagttaaaaataaaagttaaagggaaatccacaatttattatattctcgtataacttgttaacaaaacatatcatcacagaattttaaagctagaaatcagcgaagtcttgtttttcagacctcagtttagatatcacctcttagaaagaccttcttttattaccctaattcagctgcttgttggttttgcaatttactatcacaatttatggtttttggttttgatcatggaacttggtttttactgatatctttcattagactgtaaagttactgaagacatgaattgtgtctaccatgttcactagtgaagccccagcagttacactagctgtagacacatggtaggcattagaataaatattttttgatcaattgcatgaggttcagaaacttaatctaatttgtccaagaccaagtatttgttagtgataaatccattagaaccctggaatcctgtttcctgttgtgcggcaatggctacatgtaggggcctgccatgcctaattccagctttctaattgttaggttgcatgagaaaccctcatctggttcccaatgacccccaaagtaccctgaaaaaagggaaagcttattcctacccttctctttcatccagagtcagataacaaagaacaaagttgtcagggaccagtgctttcttcctgtgagcagaaatgtgaagcatggttttggttggggtttttgtttgttcggttggcttttggttcagttttgcaatatttggcttactattctctcaaaaagtctgcatcctgtggacaagaatctaagccctttggagactagcaatggctattccacactctctggggagcctatttatgagcacatgtgtttgtaattcagccactctccatatctgttggagaatagcagcctaattatctgccatcatttggttatgtttttcattcctggcatattggtgacactcctctcacctgagccacatattcaattaattcatatgtgttaccacattgatcttaactgtgaaaatctgagcaaaatgcatacttggtgcagttatcctcatgtcaggtagtctgtggtcagtcacagcttttagtcaatagataaaaagttgtaaagtgtcttaatttgagaaaattggctaaaccaaagaagcatgaatggatagttaccaacagctggatttctccaaatagactctttttttacggtttaacttaagcataagaccattttgagttatggtgcttttcatttgacttgcttcatctatctttctggcaattcttgtttacgctccttagactggtgaataatctaaatgtcaaccagagagtctgaacttctatgagtaactcatgtgtcacataatctatgtgacatagtagtgcatcacacctgcagcagcatgctatgggaattctgtaattaattatatatgctgctgtcaacaatgaaaagaaggtgttcaagtatcaaagaaccaactgaaacttccacccaaaagcaaagccaaagtgagaaaggtaccatgagctcagattattttgaaatttacagataaaacctagcttcaagtacaaatcctgtggaagaaagagcacacacttggtctcagacaccttggcagccacttcacatatgttattcctaatcttcccatttcaaagatagaaaattctagtctctaagagactcaatgacttgctaagtttctcagactaagttacagtacatattttatttccagactcagttgaattctcagatgctcctatgtcatattttatttccggactcagttgaatcctcagatgctcctatatcatgctgttatgacgttgggttagctgaggtcactggtaaggcaaacctgcaaccagcactccctctacttcatgtttgcagtagaagctgcctctataaaccttccgtgaacctaacaaacctatgcatcttgaggtgcattgttgttcaaagcatctctccatctcttctaaattatgatagctaataatggaaaacacaaaatacataacaagcccaactaccttttttaataggataaaattgcataagaaatagctgtctatgaaatttatgtctattttatgttatgaaactattttcatcttttatagttttagttaatagtttatgtgtgcaaacctccaacctgttacaaattttcctcaatttgccggtgcatactctagcttagggattactgaaatatcaaaacagataataatatatatgctttcagggaaggaaaggatagatctatgtagtccaaagctttcttttatttttttgataggccctagagttgatcttgaaaattgccagattaataggctgtcccagccctgagaaatcgctaatctagaagtggcaattcccaaggcaggttttgaagcattccattgtcttttacctcaagggatgtatgaaagtcactagctgaaatcaatacaattaataataaatacaatgtattctacatggtatttttaaggggtagagtaataatctcaaaaacaagctatgatagatttttgtagctgcaaaaaatattagaaacttcaataaggcaggatttaaaacaacctaagaggtactatagactgaaaatggaattaacttcttaaagagaatcatgaccaatacgtaagggttatgaaaagaaagtataatatttgagtggtagtttccctgttctgtgtaactactttcatgtcagatatgaaggtcctaaaacataggtgttatttttcactagtcaggaaaggacactagactggatggtctgtgggtctgatccacagtaagtgttctgattgctgaaaaatactataagttgtagagcttctagctgcgaaatgtttcaaaataaacctttgtcatctactttggaatcatattaatgccctgtggccttagaattgactctagaagctttcagttaaatattagccgttatacctgtacagaaaaagttgtagaaaggcttaaaaggaaaaacaaaagagtgactgaataatgtaccttgattccttgatttttctcagttactatgatgatttttgtcatctgttgaaaaaggtttctgctaaatttaattatcagatcatcatctcaaatcttcaaagttcctttttttgtctttctctattaacagacaaattaaaagggaaggatcaagtatatgaaatgaaattgtgatgctccaggaacagttttaggtcttacgtttctcattggaagaaaagtcctctgtcaaaaagaaaattttgaaaagtttaaattatctaaaaatatacagtgcccctaaacttaacatatataatgagtgtatggcctggaaatccaatctcttcataggctatttgcacatgcaatatcaggaccatacttacagttaaaaaaaaaaaaagataaagaaaattcttctttatctgaaattcaaatttaactaggtgccccgaatttttatttgctaaatctggcaaccttatatatgtggaaacataatatagtttataaatattatatatatagtttaaaatgcatagtgaatgtatcagtctttaggtataaatagttacagtatcttttgtccatttgattacatcactgcagcaactttcagagttgagagaatgttggatcatgagaaattgctataaacattcttatgggaatcactttgggtctaggaaacgtcaattttttagtgttccaataatgtgtgttatatcatctcttgagaagttttcagaaattctgagaaaaatggacagcagaaaagggttagatagataggaagaaatatgtaataatttggggagctgttcaagccctaatctcatttaggagattagttatagagcagctatattcaaatttgtttgatcttttgatatttttcaattctgtatgaaggcattaatggtttttccctgctttgccttttaatatgtcacttgagcagagacttgtcctctaactagcaagtagaattgattctattgttgcttcatcataatttttgatgcagaataatggtagatatattcatgcttgtttttcgttgtatacttacctattgattactacgttgctgagcagttaagacaagaagcactcaattctaacatgtttagaagagtttctttctgatttggcacatggacagtgagaatgatctcactgtgtttgttccctggcacaccaaaggtttgctgcagatgttagtacagcagaacttgtttgctaagatgacccattatggaacactagctgattaagcagacgttaatggacaattgcatgtccattattacttctttgaccatgttaccaactcaattcaattgcacttgcttttcaaataagacaaacctgtcaataaagaaactggacatcaagtttcaaatgattggtagagtttatagggaaacacaaaaaggagggaagagatgagatgcacattgtcaaataatctgaaatgttaagaattgtggaaattgttagtttcataaggagttttagacaagcacactatatccctcattctgtttatttctttttcatttaaaacttagatttgctttacttctttgggtcttcatttcttcccatgcaaaattcctgaaagtcaaaaggaagattagaagctagccattttaccactaaagaaactgagccccaagaagttaattcagcttacccaagattacatatttgcttagggccagagctaagacagggacagactctgtttacttcatttctcactaaactgtaccactgcagtttcgacttctttctaccactgaaggcacagaatgcactgaaggcattctgtgccttcaggaggaattttcagccccttcactttcctgatgcccgggaattctttttaagttatgactaacaaagtataaaacatgagtcaaaagttagtccctaataaagtcattgtgactttaatgacttcggcagttgtttcattctgcaaaaacaggaagatcccacacaataaggcgcctgtctcacagctgggctcctgcgtagacggccacccacaagagtaactaactgctggggctgccttcctctctttgacacctttttattctctgttcttacagttttctcctactgacctcatcctgaggttatccatgagaggaaggtacctgctttagctagtctttgatagggtgaagaatagttttaatcacttaggagtcactcctaagtgattttcaggtcaccctcaacaggcctaaattagtcttagaagaagctctttcatgggctttatactagcttcctgtgttatcactattctggactgttttattctcaaaaacataaaatccccaaattttagatttgagaagagcctgcgatcattccagttcactcctcctatgtgattagtttaactaagaactcattaccaagatagtgcctatcttgcctgcggatctttgcataaagctcaaactaattctcccatgagaaatatagaaaagtgaagaagtgtcctatcacttcagaagaaactggctcagaagaaataatctctgtatgcagtgttaaaactaaagaaaaattgaagccatcaaacaaaatgttcctatcaagtgtaattgaattttagcttttattacctattctctacttttaaaataacttttcactattaaaggaacttattccaaaaatcagacaattttatagaaaaggtatattctaggccaataatattaaatcacatatctagaaaatataccttcttcccttttcaaaaaatagaagcaatttctagcagtgtatgtgaatctaatgttgggcataagcttaagaaggcatcggaggaattttttattagagtttattcacaaattttgcttgtctgtgttgaaaaggggcattggccatttcctctggggacattatttctaggtaggctgtaacagggttttcctgtgaaggcagattcttagggaaaatagtatctgtgtacatgagatggtagagacacatttatctttaaaataatgtgttcctgtttgtggatttctctactgaatttaataaagtaaataatgcccatttccttccaatccagtaactccttgggacacagttttacccaggagctattttaccttcgagtctggatgaaacgtgtaacttaataaatagattccaaaagtcttacactatgaaactctgagggatgataaatgcttcccttcctttgttatggtctgaagcattttcaatttgagttgttttcctcagtcatgtagagggagttttgttttctgggaagtcttggttgctggtaaataatgtgtccaaactgtaggaggcagccacagaatttatcatacaagtatgaaatgttagggttgatcattctcattttacacatgagaggtgatgtaactacacaggagagtgagagctgagaatgaaaagtcaagatttgtctactacattgtggctgcctctggctcaacagaaacactcccatgtgggagtcagatgctgaaagcccaactaagcctagctcctcaactgtctcctcaggcttaacttcaaacataattcatatctattctatttcttaatgtgtctcatcacacagttaaacactagtcatactaactggactctacatatactagaatgtaaaagatacccttccaccccccgccgtctgctccttgaaggccatgtctgcctttcttagtttgtacagagcccaacataaatgggcccttcataagtgctttttgatgagagcaatgattgctttcacatcagtgtggttgggccctcccttatggaggaggaaaaccaacagttgttgctaagcaacatttaaaggactaggttagtttctgacactaagtgacctccatttgcatacttcgccatgttgtgtgttttatggttgccttaagatgactatgttttttggtagcattgctgtgcccttagcaaaaggctcataggagaattagtttaagcctgggaaggaggaaggtgatattcatctgttaatgacttgcatgagtacactgatcccttcagtaaactatgcgggaaaggtgaggagtttggtttattttcagccctgcagctgagagccacctccctgattccatattgaaagtgattgacaatgtatcccaacagggtcctgtggcaatggaagactatagaaagaaaataaacagagaaatctttcctcttatagccttttatgattcagtttctacctgctcctatcttctgagcagagttgccgatatagctagtaaagaactggtcctaccctctctagactgtttgctgttgtggttaaacaacatgccctaatatatctattcctactagaatgaaagctgattaaaagcatgaaaagagtttttgtttgttcctttgtttttttttcactgctatatcatcactcttttccctggtcattttaggtattcaataaatggttggcaaatacgtgaaaaaagggcattattgaactactacaaacctgattgactctaaaacattcctaagtatttcagagagactaaaggagccaaaatgagacaattgtttgaatgttatatttgcctaagtctagtgcagagaaaattatggaagaaatcatctgtctctaagctttttacaacatatttttacaatgatccaattaaagttcacttctttgccaaaattcagcttatcggtcagagcatataaacttgttttcttcagcttctgagtcttcagcctaggtgcctgtcttttgaggatttaaaatgagaggccattgtgactgagcagttgtgtctttaaaacgaaataatttggaattcatgtgattcacctgggattcaaaattgcacagaggttcaataagtaaaatatgctagctgagatgattgattcagagatgcctggttacaaacatattgtatcatgggaaacacacacacatacgcaagcagggttacccagaaggaggatgattggacatctttgagaacaatgcctggtgcagtgagccagcaggcagaaatactggcttgcattggcttcacctccaaaagccaggtctcctaggcacaggcgatggcatgactccgggcttggatgcttgaaataaagctattgttggatgcggatgctcatttgaaaggggaatgcctcacaggaaaaagagccaattgcaagttggggctgttgccatggtgctttgctattccttcaacttgctatagatgaaataaatcctgggagtacaggggtagggtaacagaggggaaagatgaggagggaaatggggtgaacctggggcggggaatcccactgcagtaaagctctagtgtttccccttgcctgtgctttaacgctgacaaggagaagggaggggctgggaagaagggagagagaaacctgcagggaaggaatgactttctcaacatgccctggattgctaaaataaaataaaaattaatttaaatcctcagatttctaatgtgagttagaagatgtaacactaaatctcaaacaattcaccattctttcagtaaatgaatgttcatatttcctaacacactctggatcctagatggaaaggttaaaagagtttaatacatttgtcgaatgcaatctaatatgcatattaatgagctgatggagggcagaaacttacatgctgcataggaagtacttttcaaataaaataaattaattccattcccattcattttactatgaaaagaggctaaatgcactggcacacgcttggtgtgtgcgacaaataatcctccaaaaagctagttcacaaaaattcttgtgtactggcagcctagtctaaaaacagccatggtcctaaccttttttaaatgtttgcttaaatgttcagaaaatcgattaatcaaatgcatcatcactttgatcaattagagcggctggatttttgtgcagaggctgcatctgcagaattctggtctgcagtggagagagagggttaaggaacacctagttgaaatgggggagggtactgacttcagatttacttaaatattcatggggcttcctccattttaatcttctcctttttaaaagatggctgtgtttcctagtctggcaactcctcaggaaagaagaatttcttcttccttgcagagttcagctgagtaggactaatgtagaagagtggaaaccccttcggccaccagggctattcataattcataagtgcttcaaaccagccagctgaatacatttggacaggctcttgctccttcgtgcaattcctgatttcattactctcttctgccaggaaataagcagggagcataggcttcttgcaagaatggagtgcgaagatgggctttgtttggcttaggaaatgccatacattttggaggtttttgtcttttctaagttttgattattttatcactgaatctgcagggctttcctgatcctttcgggattgctctctcagaactgtgaattctttcaaagggatttgtggattgtggcaaggagagcattccaaaatgcctgaggcaaattatttgttatctgtatcttggggttacatcaaggtgggttaatttgattgtgttctgtgtctttgataaaatgtgaaacgtacctctgtgtgtttttttgtgaagtacaggacatctgtaataatttgatttgtgtgttcatttaacccactgggacctcttattttgaaataagagcatgttatattacattttatttaagtgtactatgctgtgttttaatcctgttctttttactgaattctgttttttaaaagatgcttctttttttttctttttcccttgaacttttcacatataatctcctctcaccaaataggttattaaattatattttagaggtaatttcagacaaatgtatttttaaaagtaggtacagtttcaagtggaattatcttgacctctattaaaattccttttcctatgtttgcatcttcaaaagtaatcagatgttaattctaagaaatcttaagaaaacctcttttccaaaagtgacgttggaataatttcaaattgaagagatatattttgtagaaacagtattatttatctaatggtatctgctcatccaacctcttgattcctggacagtaaagttggaaacatttaaaatgaacatttgctctttttaaagtggttaatgcatttttgttctttataaacagttcaaaagaatgctgaaccgggagctgacacacctctcagagatgagccgatcagggaaccaggtgtctgaatacatttcaaatactttcttaggtaagatattaactgggaaaaacctgttttataactggggttttcagaattaatttctacaacctatcaaggacatcctcatgtgaatttgggatggagttgagtcatagaaaaatccatttaaaataataactaaggccagtcttcaaaagaaaaaaaaataagcaggaagatcatgtttttgaaaaaaaagaattaaaatacccatccaagacagagggttattatgggctaattgtatttaaacggccctcagccccaccttgtctgcctgcctacttccatctttgctaagacctctgaagtaatgagggaaatccaatcacccaagccctagaggcagctccattagcttctctgacatggtagcctttcacttcctccaataactgagctttgagcaaaaggtttcctctatgatgttttgtaggggatatggttgaggaataattctatagtgatttggtccttgagaataagctttggaaataatttgactattgctttgctaagttatttattaaagaaaaatggatggtaagggggagaattttaatattatctgaaggatttcatcttctgcaagcagcctcgttctcttcccaatctgatgctttatctattattctctgttgttacattactggtatttaacacatgatttgctgaccaaaaagattgcatgaatggtcctcaactattgtcatgcgtgttatttgattatttgggatttttgaattcagtcttaaaggcacttttgtctaacgaacctatttggactattttgatttaagaagtcctacagaatctgcaaatctgtacatcaaagtaaatggatagcatttagattctgattttgttgactttatattgctactgaattacgcttgcttatgaaacctcactttccagggaagcgacccattctcacagctgaacactgcatcctctcttctttttggaatagccatatggcattaaatcaatgagcattttccttgatgccttactgaaacaaataccttttctggttttatttctaaaatcaatcctatttctctaacaccaaagcagttcttgctatcagcagatcaatcagccctctctttgagcagcctcatacagagcttactgcattactctgcagtggatggtcaccagacgtgattaacaagtgcctttctaacagtttctagtatgtgagtgtctgcagcacttgattttctccagctgcagttgcaacgcctttgtcagagaacaaaggagaagaattttcatccatcctagctcccagaggtgcctggaatctaactttacagaaagcattaaatactgatccttttcttctccttttatccatttgaagacagggatcttctgctgagcatttcagatataccctgctctgtgtaatgcccaacgatttttcattagctgggagctgttttagggacattttacaggttaatgactgtgggagaggagaataaaatcaaaactgcaagaacccatttttgtcttcataagcattgcattttaaaatacgagggcttgaagacttctcagaagagacactcactactggagttaaagttatatgaagtccctgagcccttaatcatccaagactggacctaagcagtcctcttcgtttgtagtctctttcaatatctgcttatcaaggacaacgagaatatcttagtctactaattaatcttttttatcaccatagtctaccaagaaagaaagctgataagataataaagatgattcattcctcagagtaggaaaaaataaaaagaaaaatttaaaaagatgctaaatatgagcgctgagtctcaacactgtctcaagatgaggcagatgtcaactttcttgcctattctgcttgctatttaggcatatctcttgagcaaaaccagtcatttgtcttctcattgttccaaaaattaaattcaagaacaaattgttgaggaaggttattagaatctcaatccttatagactcttagcattaagagggtggtgtgtgtcagtgggtgtatgtgtttgagggtggatgtggtaaaccccatcaaacagactagacgggcagattagaattttaaatgttcttgagaaaatataggaagaaaaaaacctgtaatattaacaaaagatgcatcagttgcctcacttgtaaaatgggaacactggtatagatgacatctcaaatcccttccaactctaacttactataactctgatatgaactgagtttatcagttttgctaagacatacctggccatctagattctctgtggtgaaccctaggcttgtaatctgacaatctcaaaaaacaaataaacgaagtttgtttccagactgccagtgaagggcatggaactcttagtcttatcctgtgagcatgatgaatgttcctggaagaccataaagccttcttcataaactttctgatctgcatgggaccataaaaccttgtagtccaattccctcattttataggagagaaaacaggggacccagagggatgaggtaacttgaccaagatcgcttggctaatactttcctcagccagaactaggacttggctttcttggcatctagacctaaataccctgtcaatcctttaacgaggaaagaaggctgttaggaacgcagaacatatagaagaaaatcacataaggactcttaactgatacatatatcattttggaaacaagtctttaggaatcaggattgttggagctaaaaataaaatgtttattaacaggccgggcgtggcagctcatgcctgtaatcccagcacgttcagaggccgagatgggcagatcacctgaggtcaggagttcgagaccagcctggtcaacatggtgaaaccctgtctctactaaaaatacaaaaatagctgggcatggtggtacatgcctgtggtcccagctactggggaggctgaggcaggagaatcacttgaatccaggagatggaggttgcagtgagccaagatcacaccattgcactccagcctgggcgagaagagcaaaactctgtctcaaaaaaaaaaaaaaaaaagtattaacagtttctaataatataaaaggttcctgtaagaccatggcaaccacctcagtgagcacaaaataagaagatcttagcaatttaccttaaacttgaagagcaatatttcaataaaagccattaaatgttaaaaatgtgtcatccagggaggagggaaatcccttaatccagagataggtgaaacttgtgtcattcctatcttttaaaaaaaagtggtgcaggaggacagggagaaaggcaggcagtagactatatttaccagtccaggcactcattgatgctgtcacataatgggctccaggttgctggtgcaaggggaaatagaagtgtctaatttcaagggaaacaaagcaggacctagggagaaggagaataaataatgcaagatttttacatgttatattacaatttagttaatattttcatgaacagagaaaagttatccttttaaatcctctacttaccctctcaaaacctagaacttagaattttcaagatgcaaggaaaagagcttaggaattttgcataattgaaaagtgtgatctagcaagacatgagcctcaaattatgccattaacagaatttggatgagactacttttttatccgctttttgtttgttttatacaggccaactgtttgctcactgtattctgactattccataaatgtaaattcactcagtgtttattgtgatttttttgagtctgagtttctgattatttccacactgtgctggctaagcatttaatagaggaaattcagaatagggaaacctattagttgttccaatgcctgcatagggaaacacccattaatgtcaaattggcactatttgtgaataatggtcttcttcattattgcagtgttccagacacagtagtggttcagctcaattactcactgttgcagggaatctttaattaaacaaagggaaaaggctgctggtcctactagaaatggttatatgtgcagtgacacaggagaatctaagagcctctttaaccggaggtgaagaatggtggtaaaaaggcaggccctatggtagcctttcattttagcaaaaagtagtagttattaggagtaaagtgacagggagaaaagtaatttcaaactaatataatatataggttttatgccagagattgtgtggcaggaaaaagatttttgacaggaacctcaaggcctgggttctatgctactaaatcactgtgtctggagcaaagtaattgcaaaataaatatctgttaaataaattgccctctgagcttgggcaagttgctgacttcatctgaaaaatgagagtgtgggattgttattggttcttaaacctggctctgattatccaagtcacttgggaatcttttaaaaaaaatactgattcagtaggattgggtggggcttattcagaaaaatctgtatttttctgaagtttcctgggtgcttctgatgctggactaggttggaaacccctaaactaattgagatgaccactaaaattccttcctaagcaaaagtcataggcttgtgagtgtaggagcttgtggacacctagagacaatactgatatgttagggatggataattcccttgcttcagtcccacagagagcaggtgaggtataccacgaagccagtactgtctcactgtgcttgctttgctctgatgaagtgtccacaggggcctatgagcagccagaggtctctggggaaaacatgtgactgtgccattatctgcaagagtcaaaacaaatcgtctagatcccagaatgccatctgggagcatgtcattttcaaatggcaaagttgtcttcctactaattttcactgtaaccagcggaggtaaatgtaggtacttttgaaagctgcattaactctttcagccacagggtgtcatttagttcaataaagtagtttttatgcaatttaataattgcctctgtgcacccaccagcatccctgtggcctgaaagagttaatgcatttttttcagaagtactgaagatacatctccctgtgaagtgaaatggaatatttgatggctgatatttttaatagcacaatgtaaaggaaagagcttctataagcaggtaggcactttttttttcactaatcctagctctgctgttaccttgttgtaacataattttaaaaaatattatgaagtatcataaatatttaataaccttaaacatgttaataagtgtaatgcttattacaaacaagaggccttattgttattatttattggtagaattaatagactccaggcatgaaataaaaccaaaattatagtcttcctctaaacctcaaatggtaataaaccaagcccttaaagtaattgtttgaggattatgaaccatttatatttctaacatatatactgcttatttaaactgagcccttgctaaagccatatggatttttaaattttttttaagtaaaaataagatgagcagatcatgaagcctgtttttattaatctgatggacattttattatacaaaaatatgttaatccctttatttaaaaatctacatataagtattagtgccccacattgcaaatgtataagtgtgtactccttatacactccttatatacccctaaattacactgaaaacagaagatttggtcttgggtcctatttttgctgctttctggacaagttacttcgttcctctgggccttaatttgcctagcaataacatggaacaacaaatcttatttttctcaacaaattttatattttccccacttactttatagaactgccctagagatacagtgaaatagtgctacaagattttattttataagattctaaagctgttatagatggttagagttgttttgaatattgcagtggattctcatagacacatgtgctgaaaaacatattcctttgtctgttgcagacaagcagaatgatgtggagatcccatctcctacccagaaagacagggagaaaaagaaaaagcagcagctcatgacccagataagtggagtgaagaaattaatgcatagttcaagcctaaacaatacaagcatctcacgctttggagtcaacactgaaaatgaagatcacctggccaaggtgtgtataagctcaggttttgtgcatgtagctctctgctttacagcagacggatgaccgtataccttttagaaaatagtatggattgcttttgcattattattacattttgtgttagggaagctcatatgaaatgactttactgtgagcagtaaggccttctgaaagctgtcatttgaggaaggttgattgaacatgagaccaagtcttgggggatagcctggatctcttatgctgggtagccattaagaatgccattgttggggcatctgatggaagatcctttttccataccaaagaaccacttttttttgttttgtcctgagttaggtttttatggacagttcattatgaatgaagaatccttctgaagagacatggggaaaatccaaggaaaggtcaataggcaggtctgaattatcccagaggacatttcagggactgtatgccaaggaccaatgggaaaatctgcactaatctgtagtgctggaaaagaaataaagagaaactgacagcactgactctggagcccaaactccagtagtggagggaggcatagaaagaattcatacatcctttaggaggccacacaaagtgactgctgaggtcctctcagccttgtgagaatatgaaatgagcttactgtgagcagtaagaccttctgaaagctgtcattagaggaaggttgattaaacattaggccaagtcgtggtggagagcctggatctcttactctggatagttactaagaatgaaataaattggtccttaaatcagataaccttggaataatctcacaacacaggcctgagtgatgtttcttccaggtccgtctgtggcccaggagccctaggatgtaattcatgactggcattcttcatgaccttttacattcaattgggttgacttatgcacattctgatagctgagtcttcctgatctggccttcagtgatgataaccaaagggcagaggagttttccctgagactgttttccagctgtcactaatgggccagtaagcagcaaggggagagacagggacattgaactagagtgatctctattcacttgtggccacctttgaaagcaacattggttgaagactgatgcatgtccaatataggtcagcaactaaatttataaatagatactttcccttttcagaataaaaaatgttcagaaacttgtagctatcatgaagaggacacccgacctcctaggtcatttaactttcagattttcacacaactaaagcactctaaggagacactctaaagacttaaacagccaatgtccaaaaaataaattaaaaaaatgaggcatgttagcacaactttccttattcctaaattcctttaaatttttaattataggagctggaagacctgaacaaatggggtcttaacatctttaatgtggctggatattctcacaatagacccctaacatgcatcatgtatgctatattccaggtgagtgaacaggagtgaatactggctttccaattggatggctctttatgattttttttttccatcttacttttctgatttaactttcctcgacttttggacatctacttatttatgttctaatccattttacaacacaggaaagagacctcctaaagacattcagaatctcatctgacacatttataacctacatgatgactttagaagaccattaccattctgacgtggcatatcacaacagcctgcacgctgctgatgtagcccagtcgacccatgttctcctttctacaccagcattagacgtgagtaattatgacctgttttgcattcctgcccatcctccttcaaaaatgccatatcagctggatgtagtagcatgtgcctgtagtcctagctactcgggaggctgagttgggaggattgcttgagcccaggggttcaaggttacagtgagctatgattgctcccctggactcccgcttgggcaaccctgtctctaaaaaaataaaaataaaaaaaatttaaaaagtgccttacaatatacaatatacttacaaaattaatgtaattagaccaccctgcatacttgaacaggttctttataaaatgtatcacatccattaactgagctatttataaaaaatgaatgacatttctacttgttttgctttctaatatcagagtaaccttccctttacatctcttactattaaaagtatttaactgtaaagcaattaacagaatttcagggcaggaatcatgtcttattcttcattgtatttctactaagggatgcagtgtatctcaaaatatcttgttcagtgtccggtaaatagtatattctcaatatgcaattacttatctgaactgcccaatgccaccctaggtatatatagagcactatattccaagggggatatcacagaaatataaaatactctctatatttcttattagtaataagcatccagaggcttagtctcctaaaaaattataaaactgatgcaatgtgttgaagaagtagtaactaaaaatctagaacagaagaattaatgatgctgaaacaaggagaaacaatattcatatttgccataccaactctgagaaggtggccgtggctcccttccttcatagattaatgcatttgtgtataccgatatcatcaacaatgtgtacagcaggtcatactcttacttgacaaatgaaaatgatggtcaagtactcccaaaatgtgctggaccactgcaggaagagactggccatgccctgtccagcctcacctttacagattcagtttggaaggtgaaaaaagattggccacaacttttttgtggcaactctattgcttgtgttgcatattttctaagaaaagaaatccaagaaatcttgagaaagtgagatggagctaagggtgtttgatccctctgaaggagagaaagagtactgtttttataccctgtgtaagtatcatagagtgaggcaacactatctatcaactgctcactgttattaatagtatacctgctgtgtggccagaaattgacaatgatgagtgctgcaaactttttagaaaagggagagctcaatgagtgcttgggtaatgtgattggtctttataggagaggtggaaacccacctcaagctggcatttgaaggaccagaagatttaactaatcacagaggatgaggaaagacatttcagctctagaatgagcaccagtatataccttattaatactaggtttgaatcattgtgcatgggtgggggcagagaagcattcatgacatgacatgaaggaattcagcagtggggcctcaggtttcacttcttagaaaggttctcaaatcttcccctagtaagtgattagtgggtacgtactgaatgaatgaataatatctgaaagcttgtgaccacaccataaatttagctttgggaaataatttattgcttatcttatgaatcgggagtttggccatttttctctaagttattcagctaagagtatatgaaggttgttatgtctcagagcagagccagtctgacttgcttctttgacttgtatctgcttgtgttacataagcaccatgctgccacatcactggtccaagaaacaaacattagacgtttacacactccatgagatttgtgctaatatctttccaagcatcagcctttaggcttgatgtgagattgagctctggccatcatccctttcacatcagagactttatgatgatgaacagaatctacatttacttaaattagtatattgagatattacataaatcaacaatccctctcccaacaagaataaagtaggatactttacaaatgaaactgaataagcaggataggcgaattggatgtgtagttaaatgtgtttatttgcccgacaggctgtcttcacagatttggagatcctggctgccatttttgcagctgccatccatgacgttgatcatcctggagtctccaatcagtttctcatcaacacaagtgagttcaccactacagcagtcattccagataattgtatgattcactgcttaatttttttcctcctaatgttttcattatggataatcacaaggataataatgaggcaatccttccatttctctcaaactggtcaggcctttcgtggatactcagtccaatctggcaacacaatgtttgagctgcatggagaacttggagagggtcataggggagccataaaaagtactcaaaatttggcaaatacaatatgtaaggaaagaataatagatatggaattattcataaagaacaataaaaggtttggggatcccatgataatgactttttatattatgcaaaactctcgcacagagcatagtaactcactactgtccctatctgcttgggaagcagccacaaatgttgaatctgcacatgggaacctccaggtaaaaataagatgccataaaaagcactggaatgagtttccacagttcagaaggaagggtcattaaaagttccatacattttcttccaactgcatagatttgattatggattgggagtagcaatgacctgagtgaccaggggtggtctagccttaggattccaagccatactcaaagcttttgtcatgcttaaaatgtttagttttcatacctttgaaaatccattcattttctcaaataatgtactatctctaagtgctggaaatctaagtactttgagaatattggttattgtagtcatgaataacatcaagtactgacagttttctagaaatgctttttgagctacttgctgtaaaagagtcctgatcatcagtccttgacctttatccaaagaatatctgaatgacctaggtttggagtacactgggtccttttacttcattcttctgttgaacaaacaaaatgttggggcagctacatgtctgcatggattgtatcagttggtagaatgtggtgtcatgaatcatatataggccagttagcctcacacagaaaaatggtctatctaccacagtcacctatagcactgcaacatataaagcctgcttgtagatctgtggccttgatcacaggatgaacaaaacaagagtactcattggaggttgtaactaagagcacactgttaaagcaatgatatatgtgtaacagaacctgtaattaagtaacacattaccaccacttgtctggtattcttgattaagagaaaatgtggtttcataagtctgatgaccatattctcaagcagacttctgtctaacaaaagatgcctgtgattcttctatataaaaggcaggctggaagctgcagcttaggtttccagatattgcaatttctggtggagagagccaaaagacagaaaatttgacatcagaattgttcccaaaaagtagtaatgtttagtatcatattaatagaaagctctaaaaagtgacagtatttgggtaaaatgaagttttacatcaagcattatctttaaccatccaaaattcacaattgccggagattagggagaatgtaaaatgtgaatatagcttgaaagtctcaatacaattcataaagtttagtggtactttcatgttgttcttttccaaagtacaaaatttttgaagatacataaaaataggatttagctgctcaggaatgcccttacctaatattaaattcttcatctgagatatagaaggagtaaaaggattttaaaatacaatgaattttaatcacagggaaagcttatacaccagtagaagcattttttgcttagaaactgatgacttctgtttgtagagggccactgcttctctaagaggaaatgacatgtagctggtggttcttgaaataatttggagagaactaggtctgatttcactttgagataatgccaacattcaaatcatatccctttttaattaagtcatcatttggtctgatttattagattcagaacttgctttgatgtataatgatgaatctgtgttggaaaatcatcaccttgctgtgggtttcaaactgctgcaagaagaacactgtgacatcttcatgaatctcaccaagaagcagcgtcagacactcaggaagatggttattgacatggtaagactttagcctctctacattcctcacttactgccattctctctgatagactgaatttattaagagttttcattttctttttacccaaggtgttagcaactgatatgtctaaacatatgagcctgctggcagacctgaagacaatggtagaaacgaagaaagttacaagttcaggcgttcttctcctagacaactataccgatcgcattcaggtatttgaggaaagtctttgatttaacacaaaaccaaaccaaactaagctgaacaacaattagaaaaagaaaacaaagataaattcagttattggtatatcctaggctactcctatagcttagggcttattttaagaacaagctaaggaaaatggacattcaagtttatcttctaatttatgaggaaaaataatctctatttgtggaactgcttattagttatataaataaatcgcaaaatctatttgtaatagggcatacgtgactgttggttccaaaagcttgtgtttggatttaaatcccattgacttgaagtttgttaggtctgttttggatatacaaattgccatcagctgttctcctctttccacaagtggaaaatatgaagttatctactttgagtaattctttgcattctttccaaactgagaaaaggaaatgatagcagcatctgacctctaatgttccttccaatttttaaattcaatgactgtcggtctaagaagacacacgttttcccctttgggactctataaaagtaaataactgacccaggctagcatcattgtaattccattttttttcggtgcatatgtcataattataatgcaactaaaatgttctcgggtttagtaccaagcgtactagtatgagaggcatgagatgttccggcagtatttacacctaattttatgagatttccaaaacttgatgatttcaggtccttcgcaacatggtacactgtgcagacctgagcaaccccaccaagtccttggaattgtatcggcaatggacagaccgcatcatggaggaatttttccagcagggagacaaagagcgggagaggggaatggaaattagcccaatgtgtgataaacacacagcttctgtggaaaaatcccaggtatctaatatgagattttcaaagtttttgtgagctctgctgattatagagctggagggttctatttaattccgtttttccaatagaatatgtatatatgaaacaataaggagacaactacgcattttgttccattatagtcaggactcatgcgacttctccattacactcagtttcacagggtggggaaaagtagtcatcagaaacccatcaaaatttggactatgtgtccctaaatcatttagatagttgtctctgatgttagcaaatccagctgaataatatgaacatcagtgtctcctccatcccaaccctctggatttctcctagctctgtcttcattcaagaactctactcctcatccttgcttccagccctctgtttttatcttctgtccttaatcaagcccacggtgaccatcaccagaggcagtctcttttactgcatagtcaaagccctgtcttgtcttccctcccaaggatgcttctatgcttttgagaacatgctgacattttctggttgtgtccaaagcaacacattctgtgtgtgctcaggacaggggacaatagtctggaggggtgaatacagaaatgtccagatgccaatagctgcagaatatgcagcaatggaaagtatcagtatccatacaaagatttttcaagaaaacgaatgggctgagccaagtagctgagattgagaatgagttcatagactgtccaagatctttatcccaaaaacatttggattgtttattttcagtatttatcctctttccctactacctggatactccaaatttgcatatacttgtaatattaatatacagttcctttgcaatatttattttgttgcttcttagagaaacccaactaaatgagtttaaaaaatctgtgaaagggctgggcacagtggctcatgcctgtaatccagcactttgggaggctgaggtggacggatcacctgaggtcaggagttcaaaaccagcctggccaacatggtgaaaccctgtctctaccaaaaacacacaaaaaattggtcgagcatggtagtgtgtgcctgtagtcccagctactcgggaagctgagacaggaaaattgcttgaacccaggaggcggacgttgcagtgagctgagattgtgccactgcattccagcctgggcaacagagcaagactctatctcaaaaaaaaaaaaaaaaaaaaaaaaaaaagaaagaaatctgtgaaagtgctctgaagtctaatatactgtaaaaatgcaagttaacattgttaatgagggttaattcgaatagcccaaaggcttaagtggaacaagatatgaatcagtaaggaggaataacacccttttattaatagcagtgatgttttatgtttatatgatgttctgtggagcatttcacacattttccatacattatcttacttggatccccaaacagccttgcaagatagataaagtagatatttccccagcatgtcaggtgcaaagctgtcctcttggtccactacagcagctctctcatccaaagctcttcactctccatcttagggacaggtcttcctgttgccatgacatcgttatccactctggtatttcccaccaatgggctctgctgaacactgtctgattggcccagcagtaaagctctttactgggtgctctcaggattcatacagctctctcgtcctgtgatctagggaataaataactagcagctacctttcaaaaacattctcagcatttcttagcagaagcaaaacaagcgaagaaaggaaatgactgcactgtgttcagcttattcaattttctccattaccttgagcttgttattttgggtccctggaaaacaccttgaaaatagtctctaacattcattaagcacacataaagaagtaaaagggagggaaaaggagtgggtggaagtgagagaaatatctgaatcatgtacggttgagtttttgtaaccagtatagatcagagattccctgactttgctgtgaaacttcctttttaaggctaggaaagcaccagaaagaagaagaataagaaaatatatatatatcatacatatatatatacacacatcatacatatatatatatatatatacacacacatcatactatatatatatatatatatatatatatatatatatatataattttatttatgaaagaatcacatatgaccaaagttcttgtgtacagtacaacttggatgtattaaatgactggccaattaccaacatgttaataaaggaaagtttccagtagtgtggaaagagacctatataatgtcccatgggtgggtgccctttgaccatctacccctaaatcccaatgcagcatctctgtagctccccagaccatggcaggggaattcccttccctcattcaactagtgcctgttctttctctctacttgtccccacccccagtgtttcctgtttgtccaacaatgaggaggccagcgtaaggccacactgctagctcatgcaggatgcatagcccctgagtaaaccataacagagccataagcctggtatttaatcacaggaacatcagcaaaaggaactgcttaattgttttttattttcccttctttcacctgttggaaatgactgcgtgctctgtagatccaaaacaattgcatggatgtccaccgaggggatatgtgtttctttcagggctcaaagtattttcacgtgtttcatcaaactcctctaccagccaaaagcattccacagaacttgagaaattccagagtagtcaggagccagctcctcatcactttggaatagcaacatattttaaagttaacaaggaaaaaatattgagtcaaaacacgttagacctgggcctgccttcttcagaaaatgactcacagaatccaagtagtggcaaagtcattctttgtctttgggtccctggaaatcatgaggattccatccagacttcttatctggcgcacataaaaggaaatgcagtctgttgtagcaagatgaacacgggctttggaatcagatgaagctgggactgagtcccagctccaccagtcactagttatgtgacctctgacaagatatttaatctcaataagtcgtagtttctgcctttgtaaatagtaaacagcaatacttaccttccaggattaagagagaatacatcgattgcattcagtgtaagacccactgtattgtgagtgcccaaatcatggaatccattatgattgatctttctgaagttattaatgttctttctttgcatggaaaccaggaaaccttgtttacttttcaagcaccatcacaataacagatgtgtcatcttatttttctccaggttggtttcatcgactacattgtccatccattgtgggagacatgggcagatttggtacagcctgatgctcaggacattctcgataccttagaagataacaggaactggtatcagagcatgatacctcaaagtccctcaccaccactggacgagcagaacagggactgccagggtctgatggagaagtttcagtttgaactgactctcgatgaggaagattctgaaggacctgagaaggagggagagggacacagctatttcagcagcacaaagacgctttgtgtgattgatccagaaaacagagattccctgggagagactgacatagacattgcaacagaagacaagtcccccgtggatacataatccccctctccctgtggagatgaacattctatccttgatgagcatgccagctatgtggtagggccagcccaccatgggggccaagacctgcacaggacaagggccacctggcctttcagttacttgagtttggagtcagaaagcaagaccaggaagcaaatagcagctcaggaaatcccacggttgacttgccttgatggcaagcttggtggagagggctgaagctgttgctgggggccgattctgatcaagacacatggcttgaaaatggaagacacaaaactgagagatcattctgcactaagtttcgggaacttatccccgacagtgactgaactcactgactaataacttcatttatgaatcttctcacttgtccctttgtctgccaacctgtgtgccttttttgtaaaacattttcatgtctttaaaatgcctgttgaatacctggagtttagtatcaacttctacacagataagctttcaaagttgacaaacttttttgactctttctggaaaagggaaagaaaatagtcttccttctttcttgggcaatatccttcactttactacagttacttttgcaaacagacagaaaggatacacttctaaccacattttacttccttcccctgttgtccagtccaactccacagtcactcttaaaacttctctctgtttgcctgcctccaacagtacttttaactttttgctgtaaacagaataaaattgaacaaattagggggtagaaaggagcagtggtgtcgttcaccgtgagagtctgcatagaactcagcagtgtgccctgctgtgtcttggaccctgccccccacaggagttgtacagtccctggccctgttccctacctcctctcttcaccccgttaggctgttttcaatgtaatgctgccgtccttctcttgcactgccttctgcgctaacacctccattcctgtttataaccgtgtatttattacttaatgtatataatgtaatgttttgtaagttattaatttatatatctaacattgcctgccaatggtggtgttaaatttgtgtagaaaactctgcctaagagttacgactttttcttgtaatgttttgtattgtgtattatataacccaaacgtcacttagtagagacatatggcccccttggcagagaggacaggggtgggcttttgttcaaagggtctgccctttccctgcctgagttgctacttctgcacaacccctttatgaaccagttttggaaacaatattctcacattagatactaaatggtttatactgagcttttacttttgtatagcttgataggggcagggggcaatgggatgtagtttttacccaggttctatccaaatctatgtgggcatgagttgggttataactggatcctactatcattgtggctttggttcaaaaggaaacactacatttgctcacagatgattcttctgaatgctcccgaactactgactttgaagaggtagcctcctgcctgccattaagcaggaatgtcatgttccagttcattacaaaagaaaacaataaaacaatgtgaatttttataataaaatgtgaactgatgtagcaaattacgcaaatgtgaagcctcttctgataacacttgttaggcctcttactgatgtcagtttcagtttgtaaaatatgtttcatgctttcagttcagcattgtgactcagtaattacagaaaatggcacaaatgtgcatgaccaatgtatgtctatgaacactgcattgtttcaggtggacattttatcattttcaaatgtttctcacaatgtatgttatagtattattattatatattgtgttcaaatgcattctaaagagacttttatatgaggtgaataaagaaaagcatgattagatta

SEQ ID NO: 36 - DNA, 40523 bp, Homo sapiens
gttcccggatttttgtgggcgcctgccccgcccctcgtccccctgctgtgtccatatatcgaggcgatagggttaagggaaggcggacgcctgatgggttaatgagcaaactgaagtgttttccatgatcttttttgaggtagggctgtttactgtcaccacccctgtcggattttacttcctaaacgtacctgtaactatccacttctctccatctcttctggcaccaccctggttaaagacaccatcatgtgtcgccaagacagccgcagtagcttcttaatggctctccctgcctctacttttgcctcttccaacctgcgctccattttgaaaaattaaaatttgcccatatcactttttttttcttaaaattatttactggctcccaattaccttgggtaaaatacagtctccacaaaccctgcctgatttggcccctgtccactggtctccctcactcccttgctccagacccgcttcagagggctatgtccctcaagcttcctgactgcctggcctggtctgaatcactcactcttcttttttcttctagtcgcaattgaagtaccacctcccgagggtgattgcttccccatgcggggtagaacctttgctgtcctgttcaccactctacctccagcacagaatttggcttatggtaggcgctaactgcgtttgtttgttcttctgtttaatgaatgaacagcatacatcaacataagaacttgacaaatccagggctgtaaaatcatcagtatggttctgcactgagatcggagagaagtaatatttctaggaaaattaggaaccctgggaacaggacgcttgctttagtatcctctccctgctcacctcccctgcactcccatcagcaccgacccacacccaatctcatagaagccttgtagctaaggatcaccctttctcctcccccactctcctcaccccttgtcaacttttctttttcgtcctgggggttggaatgagtaagaagtagcctgggattccattcactcacttaacaaacatttctgagtccttagctctagcaccttgctaagcaaggcaaaatctccaggaggcaccattcacattgcattttctgtgaatggtgctctggggagcagcattcacattgccttttctgtgaatggcaaattcttccagttaaatataacatgaatagtgtcccctggagttgaccacccaactgatactgactgagaagctgaaatgaacaaaacaaccccttagccctccaggagctgaccggaaatccagtgctaatactactttgcatcttacagattagttcttttacaatactgtttttttttcttttttcatttcattttgtcctttctgtgactctgggatgagtctttttatgaggatcctcatataaagatggacatttaggattaaagaggatgaaatcctgacaaaatagggagtctcccctttagaaaattcctaagtaaggctgggggtggtggctcacgcctgtaatcccagcactttgggaggccgaggcggacggatcacctgaggttaggagtttgagaccagcctgaccaacatggagaaaccccatctctactaaaaatacaaaattagttgggtgtggtggtgcatgcctgtaatcccagctactcaggaggctgaggcaggagaatcgcttgaacccagggaggcagaggttgtggtgagccaagattgcgccatcgcactccagcctgggcaacaagagcgaaactcaaaaaaaaaaaaaaaaagaaaaagaaaattccaattttgaaggcctcatcctatattatgtcaaacatactgaaatgcagtaacgccccacattaaataagatttataaataactatacatatatataattcaatctaattgctgttaatagttgacatattgctacatttatatacatttagttaaaaaaaattttttttcccagacagcctctcactctttcacctagactgaagtgcagtggcatgatcacgactcactgcaacctcaacctcccagactcaagtgatccttccatctcagcctcctgagtagctgggactgcagcatgcgccactatgccctgctaatttttttaattttttgtagagacacggtcttgctatgttgcctagactggtctccaattcctgggctcgagtgatcctcccgcctcaacctcccaaagtgctgggattacgggcgtgagccatgccacacggccataaaatattaattttcgcagctttcttatattttagaactaacaatggaaatttgttcgggtctaaagtatttcagaggtccttgaaaacccatgcctacatacctgatggaaaaagcaatcctaggttaatggtggaagtgggagtagagacttctgttctgttgacttcttggaagatggggtactgtctctctgggacagctcttgagaatttccctgccagcacagccccagataacaatctctagatggcgattacctggcctctcttcccaactttctagcctggagcccctagttctcccctgagcctccttagcttgtccttcttcctaacttgtatttggcttcagatgtgatccacagtctgaaaagtcactaattcattccttcaactcaggcttattgagtcctcctgtgtatcagccattgtactcatgggggaaaaaaaagacaaagcatatgttaatagtagagtgtgctggacaggcacagtggctcatgcctgtaatcccagcactttgggagggcgaggcaggtggatcatctgaggtcaggagttcgagaccagcctgacctaacatggagaaactcctgagatcgtgccattgcactccagcctgggcaacaagagcaaaactccgtttcaaaaaaaaaaaaaaaagtatagtgtgctaaaggctcaacggcaagctgaccatgttcttagatcaaaattggtagagagtctacaatgtgggttccttattcatcaaatgtttattaagtttaccatgtgcaagtctctgggaacagagtgatgaacaaggcactgtacttttcatggtcagaggagggaaacaggccataaacaagtgtcaaacaaaagactgaagccaggtgcggtggctcacatctgtaatcccagcactgtgggaggccaaggcaggcggatcatgagatcaggagatcgagaccatcctagccaacatggtgaaaccccatctctactaaaaatacaaaaaaattagctgggcatggtggcacgtgcctgtaatcccagctactccggaagctgaggcaggagaattgcttgaaccagggagttggaggttgcagtgagcctggattatgccactgcactccagcctggtgacagagcgagactccatctacattaaaaaaaaaaatatatatatatatatatacacacacacacacacacacacacacataccctctaacccaggaatttcactcctaggtatacctacataagctccagtatacctaaacaagtgcaaatttgtttaagtacagttatttgtggtagcattagtcattgttttcaatagcaagaagaaaaaggaaacaactaaatgtccatcaatagggaatgaattatattaatggagggagagccatacaatggaaggctgaacagaaattaataggaatggggcagatttgtaatgtactagcatggtaaaaccttcatgatagatatagatatagatatagatatagatatagatatatatacatatacatatacatatacatatacatatatatatatatatatatatatctcttgtgtctcagcctcccgagtagctgggattacaggtgtgtgccaccacatccggctaatttttgtattttttagtagagacagggcttcaccatgttggtaaggctgtcttgaactcccgacctcaggtgatccacctgtctcagcctcccaaagtgctgggattataggcatgagccatcacacctggccaaatatttttgataagtatcaagtgcacagtgcagaacaaaatatgtgtgtgtgtatgcatgtgtatgtacacctatacacttatatacagtaccccatgtgaagaaaaataagggtacgtgttatgcgcgtagtattatggttgttatttttgagaatatatctagaaagataaaaaagaaagtggaaatagttcttgcctctggtgggaagtgggactatgtgcctgatcaatagggaagtaaggaacactttttttttttttttttaaacggagtttttgctcttgttacccaggttggagtgcaatggcgcgatcttagctcactgcaacctctgcctcccaggttcaagcgattctgctgcctcagcctcctgagtagctgggattataggcatgcgcctccacgcctggctaattttgtatttttagtaaagatggggtttctccatgttggtcaggctggtcttgaactccccacctcaggtgatccgtccgcctcagcctcccaaagtgctaggattacaggcgtgagccaccgtgcctggccaggaacgctttttatttttgtacctttaaaagtgtgtaccgtctgtgtatataatcagttaaaaacaaagaaaagctgagtgtggtggctcatgcctgtaatcccagcccttaaggaggccgaggccggcggcagatcacctgaggtcaggagttcaagaccggcctgaccaaaacggtgaaaactcatctctacaaaaacataaaaattagccaggcatgatggcaagtgcctgtaatcccagctggttgggaggctgaggtgggagacttgcttgaacctaggaggcagagattgcagtgagccaagactgtaccactgcactccagcctgggcaacagagcaagtctctgtctcaaaacaaaaacaaaaacacaaagaaaaaatgtaaaacaatttcatgcagtagcaagcatcgagttaaatacagttgacccttgaacaacacaggtttgaattgcacgggtccatttatactcacatttcttccacctctgccacccccaaaatagcaagaccaaccccatctcttttcctttctcttccccctcctcagcctactcaatgtgaagatgatgaggatgaaaacctttgtgatgatccacttccacttaatgaatggtaaatatgttttttcttacttatgattttcttagtagcattttcttttctctagcttcctttattgtaaaaatacagtatataacacatatcacatacaaaatgtgtgtaaatggactgtttgctattgataagtattctggtaaacagtagactattagttttttttgttttgtgacaaggtctccctctgtcgcccagcctggaatgccgtggtgtgatcatggctcactgcagccaaaaacttctgggctaaagcaatcctctactaaaaatacaaaaattagccaggcatggtggtgcgcttctgtaatcccagctactcaggaggctgaggcaggagaattgcttgaacccgggaggcagaggttgcagtgagctgagattgcaccgttgcattccagcctggacaacagagcgagactccatctcgaaaataaaataataataataataataataataataataataataatagggctgggtgtggtggctcatgcctgtaatcccagcactttgggaggccaaggtggacagatcacctgaggtcaggagtctcaattaaaaaataaataggccgggcacagtggctcatgcccataatcccagcactttgggaggccgaggtgggcagatcacctgaggtcaggagtttgagaccagcctggccaacacggagaaacgctgcctctatcaaaaatacaaaaattagctggatgtggtggtgcatgctataatcccagtaataccagctactcggaaggctgaggcaggagaatcactcgaatccgggacacggaggttgcagtgagccgacatcatgccactgcgctccagcctgggtgacagtgagactctgtctcagaaaaaaaaaaaaaaaaaaaaaaaaaaaaaaaaaatatatatatatatatatatatatatatatatatatatatatgtgtgtatatatatatatatacacatatatatgtgtatatatatatacacacacacatatatatgtgtatatataaaataaaataaataataataaaacatttactttggctgctgttgctgcggggagaattgcagggtgtcaaaagtagcactggtggaggggtagtgatcaaagtctggtgctttagcccaaaggagaaatgatagagactcagactagctggtgatggaggtagaataagcataaatgtatcaaaaagaggagttgatagatcttaaagaatgattggatttgaagggcaaaggaagagaagaatcaaccaggtgggttcagtgaatgaaaccatcagaaacgaattgtcccctgaaatcaagactttgtgattgccatagttgtatgcttctcaaaggttcctcgtctcctcttccttggaccaaaagtcagaggcaagaatgccctcattcataccccagtggtctatacctccagcagcaagtcgagtgagcaagtgatgtcctgaaaggcccagtggatcagtggaatgaagcgggcaggaagacttagtgctcctgaaacaaggaatccagaatccaggagaaggatggctcagtggggctttcaagggacaagtatgggggttgaaggggtcactgtccctataccaaatccgaaaatattgtgaccaggaaccattctgtccaactcttctatttcaggtggcaaagcaaagctatattcaagaccacatgcaaagctactccctgagcaaagagtcacagataaaacgggggcaccagtagaatggccaggacaaacgcagtgcagcacagagactcagaccctggcagccatgcctgcgcaggcagtgatgagagtgacatgtactgttgtggacatgcacaaaagtgaggtgagtcgcaggacagaagagtgctttttgtttcagcagagcagcctggggagagataaaagctactcctggggcctgggcctgcattcctgagatgtgggtaagaggggcccagggtcagagtgtctggcaagcttggctctgcccctttgctgtcctggagactagggctaatcctgggctcagggagtggcctccccatggttaggatacaagtgctcatcaagggccacccctaggaaggaccaattttcctatcagaagcttctaagttatcctcctttggcccaaagggacacctcaagcctactctgaggaactctttccaatgaactaattcctacagtcacttccccagcaacctgtgcctcagcctcaaggcactgtggggtaggcctcagtttgtggcctggacatcggactgtggaccagacgactcctcccgatttctgtttgttttcagtcctctgaccccaagctggctggtgaagtaggtagagggaggagactttggtgcatgcatacacacacacacacacacacacacacacacacacacacacacacacacacacacgtctcctgtgccccccagtctccatggctggtcaatgattgactggcatttcacaggccgctggttgcagccccagcctgttgacttagaggtcaccctcggaagctagagccctgtcctgcctcttcagtgtcagtggtcactccactgcccacaggctggggtcttgggcaaaacacacgcatctgccctgatctgagtttgctgccctctgtcccgcagtcagccccactctgttcccactccctctccccagccccctagctagacccctctcaccagcacccctttcccttccctgagggtccccctcgctgtctttgtccctcagacatcctctttcctgggctctcctgccaggccctgctggagggacagttaaggaggaaatcgaatcagcagcgcccacccctgccccccttcctctcctcttgtcagacaccagacgaggttttttcctctggcttcccagctctgaatgggctcattctttttcagaggctcggcccctctcgagcctcctccccagggcgtgagttctgaccccagctcctccccccatccccactccagccccctctccagcttgctccaccctctctaccgcccaccgggactgggcattgtctgccagtccgggtttcttcctgggatttgggatgcagagaggatgggtttgcttgggcgggggggtggagagtgaaggggggaagcaggatctttgtagagggagggacctacagttacctggacttctttcctctgtctcccctcttggtacccttgactggggctcttgagggtaatgggtgaagccaaatctgccatggctcagttcccagctcagctctgtgaccttgggaaagttcctttagctcgtggaatctcaaggctcaaggttcctcttctgcaaaatggggaatgataacacctgcctcctctggagtcttggggactcagtgttctgaggaacgtggctgtaggtcagagtggcacagagtagggtccaatgaagcatggcgtccacagtagctttcctgactggactaacctttccggacacaacagcagggcaggggtggggcctggggagaaaggacacctctaaccctgatcctaacatcccgatggcctctaaggctgcctgcacactcatccaggtgcaagccctccaaggtgtggtgtgatgaaccagtgactcctggagccaggtcagcgcatcctcttcccgcagggctgtaagctgcaggactgagaggcaggttgaccaggtcctgggctggatgatggggtgagagtaaggggtcagttttgatacatgcccaacttttctctctagccctaagacatcctgggcaaattgcttacctcagttcccctgatcctcaccctaaccctaacaccagctcaagagaaaatagggatattgatggccatccagaagggctgctgtgttccatacacagcaatatttctcgaatgtttgtgacagcggtccaaggaataagttaattttacattatcactctggatacctgtacaaaactccaccttatccttactatatgaatgtgctagggttgtttttttgttttgttttttttttttttttttgagacagagtttcgctcttgttgcccaggctggagtacaatggcgcgatcttggctcaccgcaacctccgcttcccaggttcaagcgattcacctgcctcagccttcccgagtagctgggattacaggcatgcgccaccatgcccggctaattttgtgtttttagtagagacagggtttctccatgttggtcaggctggtaccaaactcccgacctcaggtgatccacctgccttggcctcccaaagtgctgcaattacaggcatgagccaccgcacccagccgtgctagggtctttttctgttcaattcctttctctctcttgctctctttctttctttcaatggagtcttactctgtcacccaggctggagtgcagtggcaagatctcagctcactgcaacctctgccctctgagttcaagcaattctcctgcctcagcctcccgagtagctgggattacaggtgcctgccaccacacctagttaatttttgtacttttagtagagatggggttttgtcatgttggccaggctggtctcgaactcctgacctcgtgatctgcctgtcttggcctcccaaagtgctgggattacaggcatgagccgccatactcggccaactttgtattactttcttaaagagagtttcccaaattatataagcttcaggccccacaaaacctagatctgccccagtataactaaatctgggaccatttattgagcaattattatgtgccaagtattgcgctgagtgcttccagagcattatctcctttaaccccagcatagtatgtcagatgctgttttacagatgagccaactgagaccagagatgctcagtcacttgcccaaggtgacatgactgatatggaatagagtcaagatttttttttttttttttgacacggagtctcactctgtctcccaggctggagtgcagaggcgcaatctcagctcactgcaagctctgcctcccaggttcacgccattctcctgcctcagcctcctgagtagctgggactacaggcacccgccaccacacctggctaattttttgtatttttagcagagacagggtttcaccgtgttagccaggatggtctcgatctcctgacctcgtgatctgcctgcctcggcctcccaaagtgctggaattacaggtgtgagccaccgcgactggccagattcaagatttgaacccaggtcctcttggtcccagaggcccctgtttctcaactccctaggatggcatagcaacctgtcccacaagaggtgcctgctttaagtgtgctcagcacatggaagcaagtttagaaatgcaagtgtatacctgtaaagaggtgtgggagatgggggggagggaagagagaaagagatgctggtgtccttcattctccagtccctgataggtgcctttgatcccttcttgaccagtatagctgcattcttggctggggcattccaactagaactgccaaatttagcacataaaaataaggaggcccagttaaatttgaatttcagataaacaatgaataatttgttagtataaatatgtcccatgcaatatcttgttgaaattaaaaaaaaaaaaaaaagtcttccttccatccccacccctaccactaggcctaaggaatagggtcaggggctccaaatagaatgtggttgagaagtggaattaagcaggctaatagaaggcaaggggcaaagaagaaaccttgaatgcattgggtgctgggtgcctccttaaataagcaagaagggtgcattttgaagaattgagatagaagtctttttgggctgggtgcagttgctcgtggttgtaattccagcactttgggaggctgaggcgggaggatcacctgaggttgggagttcaagaccagcctcaccaacgtggagaaaccctgtctttactaaaaatacaaaaaattagctggtcatggtggcacatgcctgtaatcccagctgctcgggaggctgaggcaggagaatcacttgaaccagggaggcagaggttgtggtgagcagagatcgcgccattgctctccagcctgggcaacaagagcaaaagttcgtttaaaaaaaaaaaaaagtcctttcgatgtgactgtctcctcccaaatttgtagaccctcttaagatcatgcttttcagatacttcaaagattccagaagatatgccccgggggtcctggaagccacaaggtaaacacaacacatccccctccttgactatcaattttactagaggatgtggtgggaaaaccattatttgatattaaaacaaataggcttgggatggagtaggatgcaagctccccaggaaagtttaagataaaacctgagacttaaaagggtgttaagagtggcagcctagggaatttatcccggactccgggggagggggcagagtcaccagcctctgcatttagggattctccgaggaaaagtgtgagaacggctgcaggcaacccaggcgtcccggcgctaggagggacgcacccaggcctgcgcgaagagagggagaaagtgaagctgggagttgccactcccagacttgttggaatgcagttggagggggcgagctgggagcgcgcttgctcccaatcacaggagaaggaggaggtggaggaggagggctgcttgaggaagtataagaatgaagttgtgaagctgagattcccctccattgggaccggagaaaccaggggagccccccgggcagccgcgcgccccttcccacggggccctttactgcgccgcgcgcccggcccccacccctcgcagcaccccgcgccccgcgccctcccagccgggtccagccggagccatggggccggagccgcagtgagcaccatggagctggcggccttgtgccgctgggggctcctcctcgccctcttgccccccggagccgcgagcacccaaggtgggtctggtgtggggaggggacggagcagcggcgggaccctgccctgtggatgccccgccgaggtcccgcggccggcggggccagaggggcccggacgagctctcctatcccgaagttgtggacagtcgagacgctcagggcagccgggccctggggccctcgggcgggagggggcagttacacggcagcggctcgagatggcccatccaagagactggcgctttccaggctccgaggggctccgggaacttgtcaaagaagttctctgaaattgttcagaaagttttcccgcaaagggtgtattgcgtagagcgcgcgcgcgcgtttccccccttcttgagccccctcaagctttctcaaagcctttccagttggcagcctccgcctccggactggcctgggctggattccttgggggggtcctctgccctgcccctcctccagcccctccccgctccccttcagacgattttggtttggttgctcctgcttctggcggggtcgggtgtgtgtgtgtgtggtggagtggagggtggcatagcaacctgtcccaaccagagccggggaggaaagggtggcccggagggtggcctcttgctggggtctgggttgggggcgggggagacgtttgctttgaacagattcttggggccagcttagggactgtgctctgtgacttttggagcgcgtggaccatggaggggtgggggtgggtttcttggggtgtaaagtgggagagttcccagagaaggaagctaagaaataaggccagatgggagcctagggagggctgcgttgttctgctgccttttccttggtgctgtgcgtggggaagggtgagtgggggcagtgtgtatcctgacccatctgtccacctgtgtgcattaatcataaaagctaacatatagcctgggccaggtatactctgccaggaactgtttgtggtgttttgcatgcattctcctttaatcctagaacacccctatagtggaagttctgccagcattctggactgagtagcagtccagaggttgagtagcagctagtaagtggtggggtcaagatgggaccccaggcagtgcgacccccaaccatgcattcgaaatcgctatatggatgagtgcacctggagcaatgagggacactgctccctgagtcactgggctgcaggggagacaaaatgaaagtgttctgggagtcgtgggtggtctccataggtcagagggtctggggagggagtgggtgtcatcgtggctgtgtgttgcccgaggggccctctgtgagtgagtgcatggccgtgttatctctgcaggtctacgccagggtgttcctcagttgtgtggtctttgtatttgtgtgtctgggctttgtgttgccaaacagcagtctctctgctgacttggggacacaggctgaactctgtcctctgcaggaactcccttaaggtgctgggccagatctgccataaacagagggaggtagccttctatggccacgccttcttgctgaggaagaaggttcctctcttccagggagtacatccttgccctccctgtttcccagacaagcatcttcacctctcatcttctgatgagaagggtgaggccatactgagctgtcaggctgagctgctgcccttcctcaccttgggctgggagttgatcagggaatggcagttgctgcagagctggatttgagggctgggttctctggatggggcctcctcatgtcctcacccctcaacctgcactattgattgtgttgtgcaggagttagttaaaaagtcattgcacagcctgggcaacaaggcaaaactctgtacaaaaaatacaaaaattagttggatgtgattacacgtgcctgtagtcccagctactccggaggctgaggcaggaggatcacctgagcccaggaagttgaggcttgcagtgagctgtgattgcaaatgctctccagcctgggtgacagtgtgagactccgtttcagaaaaaaagtataccacccagctgcctccagcacccagattttacccaaggggtgaggtctggggcaggaatgtgggggaaggggaggcctagggggagccccagaggggtcaggatttttctgaaatcctttcttagaggtatgggttttacaaattgcagcaaatacatccttttaatcttgcagaactccttcatattttaattccagtatgattcttccaacagcctcctctctttactatacttggggaaagtactcattttatttgtcaagaaaaaaacaattgaaaagatagggatcaaatgtaaaaagaaaaaatacgtggcattccaaagtcaaacacaaagcatgtttaattttctcgtggtttgggattacccatattcctgctgtatgaacctgtcttgtcttaacttttaagaaatgtacggtgtacttcctatatgctaggtttttatccatgctttcatttaatctctgtgacagtcctgtgaagtaggtgcacagatgagaaaatggaagttcagagaaatgaagcaacttatccaaggctcccagctacccagtaatgtccagggaatttttggactctgaagaggaggcattaagaggtggttagagtcttattccagccaacaataatgggttgaacaaagccttaggggcaggcaggtggccagatgggaggagaagcgctcctcttgttcaggcgaatgacctttccatccacttctctaggctgtagaaagtggagctgagctgggggccctgaggttccctcttgacttcagagtcctctcccttcctgtccagccaatgcctgtcttccttttgggccctaccagcatgacagggggctgcgggcaggaggggacagaggccacgttgacacacagggctgtgggtgagagagacagctgaagtgtcagcgtgaggggccagtgtggggctgcggctgggagggctggggtggggcccagggtagttgtgcctgtccttgggtgatggaatgatctggaaagagattccttccctgccctccacctgtgagaagcccctctagagtgacatctccatcttatgtttggccacccatcctccccctgggaagagagccgaggtggggtaagggatgtgtactctttcaaggagtgggagaattattctagcgaatgtttgtgttgtcccagttctgtttacaaagcctcgtcatgtttacagatggctgcgcaattcattacctcatttaactctcatgtacctcctctgagggagtaagagctgttacagccaagtttaggtcagtaaatattcaccaagttgcaggtactgcagggcatagagatgaatccgatttagcttctgccctggaggtctgggaacttgctcaagatcactcagtgagcagctgagctagggttctcaactaaagaccctgggcccaggccctggtctgatgtcaggcctgatacaccaggtgtttgtggtcggggaatcccagtgtcacttgaatgggctgtgacattatgggtctgggagagctgagctttggggacacaggtcattttactgtagtattcatggaaaccaagggaagtattggcttttctgctgtgagcaagaggagcagctggggctgcaagctggtggggaggagagaacccacctgagagaaacctcaggactggggtcaagtcctgaccaccagagtccagagagacatgaaggactgtgaccagctctgagcagagagatggattccatgacctcaactggtcccttttgttcggagactcgtgactggacttcattcatccactcattcattcattcactcagcagacacttatctagcgctccctgtggctggtcctgcctcatactgtctttgctctggagaattggaggttggggttcctgaggggcagggtcctggagacaaggacactcctgggtagaattaggacctaccccccaggaaatcaacggggaccaggtgccgtggctcacacctgtaatcccagcactttgggaggccgagacgggcggatcacaaggtcagcagttcaggaccagcctggccaacatggtgaaacccgcctcaactaaaaatacaaaaattagccaggtgtggtgtcaggcacccgtaatcccagctactgaggaggctgaggcaggagaattgcttgaacccgggaggcagaggttgcagtgagccgagattgcgccactgcactccagcctggcgacagggcgagactccatctcaaaaaaagaaaaccaatgggacagggcagatatggggacaatggtaaggagatgggagagtgggagggaggtgtcaggaagaccttcttgacttcatgtaggctggtgggggtgttagccagcaagcctccagttccctgggaaccgttctcagggtaccaattttaccacctgtctgcaaacactttaagattcttaatcagactcaaattggccacaaatcaggtaaacaaactcactagtggggtggggctaccacccgttctgaccctccagcccaacccagcccagccaccctgccctccgtagagcctgtggtgtttatcggtggcattgggagaattagtgtgtatttatgttggcgtggggtgtggggtggatttgtgtgtgtgcagttaggcctagtggaaggaatgtgggatctgaaggcaggccagcctgagttccagtcctgcctgttgctcacaagctttatgaggcgagagctaacccctgccagcctcagttgtcttctttgcaagatggaggttgcagccccagtctctggagcatgttatgcagatccaccgagagtgcctgccaggcacacagtaggtgctcagctcagttactgtggcggcccccactccccattgttgttgttttcctattgcctggcggccacagctggtatcccttgaaaagggctacagggggtggagtcggaccctgccccagccctgtggagaccctgggcttgggccagggcctggggtctgggcctgcagacagctgtgtctataaagcagctgaagggctgaggccgggggaggtcctggcagcagggcgttattttgggcctggcctgccacccccagctcctgtttctcttgggagtctgttgggggaggaagtgtggggaagaggagggggtgcaagtgggtgaggcatggagtggggaggcctccctcagggacatggacccttgagttctatttctgttcctccctcctgttcctccctctttgtccttatctgcctagagaggtgggaatagaggccattctgagtatcactaggagaccaccagtttgtggccactggccactggcccaggcagggaacctgggggcttgccctaccagcctctcccagcaatctgaaggcagggggtacctcgtattaccccctaggatttgaccttaggctccaacttgctgggagagcagtgcctctggtgtcagaccccaagccagcccttgtgctgtccctgaatctgcatgtagcctgtgggaggcggagcagtgaccggcaggaattctgggcagctcaggcacctgtgggcctgagggtgccctctgcccccacccttccgatctcctgggcaagacacgccaggtgattcatctcaccagagcagaaaaacaagttcaactgggcactttaatctcccctcactggcaggcctggtgtgagctgctaccccggcgcccctcaccaggggtgctttacctcctctagtattcctgaccttagtgggcatttctggtctcagggataccaggctggggtccaagtgggccaggtgtggcagttcagccctatgccccatggctgatggctcgcgctgggcaggtatgcagggctgacgtagtgcctttgtggcagcagtttcgtggcacacattctgccagctggttctggagtcttgccctgaggaggtggccagggtgagggtgccagcgcaggaacctttggcgcatgcttcaccctggcctgggatctgcagcctgggtccagatgcccacaactggaatctgacgctccttttctcttcatgggggactcccagaggtctctgcaatgaccagagccccggttgtcccatgcctcagctgcaactccagctgaccctccttccccactctctgggtggcattacgggggtgtggatcccttgccaagaggttggcatgtgggtgtgctggaatggcatagggagaatgcaccgagtttgtttgcttgggagaggggcagggggtatccagaagattcatgattcgtcatcgcctctcttgggggatttttacccctttgccctgagttgtgcctttgggacaaaggaagcctttctttgccagccaacaccctgtactggcgggcgagctccccagggctggcacgctggggcagcctctgaatgcacagggtgggcctagtcagaagaagcctttcccctgaaatccctctacttcccaagcacgcaagctttctcctgctgttaaacctgcagtgtgcaagggacatgggcggaggggtccttcagtcaggcttctccctgtctgaggtggcatgacttggagtgagtttggatggggtggccaggtctgagaaggtcccccgccagtgtcctctgacccatctgctctctcctgccagtgtgcaccggcacagacatgaagctgcggctccctgccagtcccgagacccacctggacatgctccgccacctctaccagggctgccaggtggtgcagggaaacctggaactcacctacctgcccaccaatgccagcctgtccttcctgcaggtgaggcccgtgggcaacccagccaggccctgcctccagctgggctgagccctctgtttacaggtgggtggcagaagaaggtgccctgcccttctgtttcctctcttgttgtggtttctcaaccaggaagtcctttctaacatctaacccccattcattttactgcagaatcagttgactctctctataacgtggctggccgaggtcatgtctggatgggatgcgtctgtgtttccgctaaatcttgtgctctcttgccagcatgatcatgtcccctgtccacctgctccagccactatccctctcccacttacagcagaagaaagggctggtgagaaaggtggattacaggcccacttctgccactgacgagccctatgaatgtggcctacacccccttagcttcactgggtctcagtttccctatctgtatattgggagcagttgtgaagctcagaagagaaatgtctgtgaaaaggttatgaacaggagggagagtggaaaccaacctgctggatcgtgtccacagaccctggaatggggccacatgcttggtttgtcaaattgcagacgccggccgggtgcgatggctcatgcctgtaatcccagcactttgggaggccgaggcggacagatcacttgaggtcgggagttcgagaccagcctgaccaacatggagaaaccccgtctctactgaaaatacaaaattagccaggcatggtggcacatgcctataatcccagctacttgggaaggctgaggcaggagaatcacttgaacctgggagacggaggttgtggtgagcctagatcgtgccattgtactccagcctgggcaacaagagtgaaactccgtctcaaaaaaaaaaaatttgcagacgccatcccatccaggcctttgctttcactgatgaagaaactgagatacagagagggcagggcacctgttcggagtttatgaaatgcccccccaccattatctttcttgatcatataagaatctggtgaggcaaggtagggcgtgatctttatctctattttatcgttttatttaagcgggaacaggactgctcagtggctgggggccttgcccaagatctccaagtactggggaaccccagggaggccctggggggtggcagtgttcctatttcagccccactctgcttccccctcccaggatatccaggaggtgcagggctacgtgctcatcgctcacaaccaagtgaggcaggtcccactgcagaggctgcggattgtgcgaggcacccagctctttgaggacaactatgccctggccgtgctagacaatggagacccgctgaacaataccacccctgtcacaggggcctccccaggaggcctgcgggagctgcagcttcgaagcctcacaggtggccttcaccgtcattgaaaccttctcttggttattcagagctgaccagggccactgctaaccagggggaggctttgtgtgcattagaaatggtgtcccttctgggcagacgcaggcagagcccgggaagacgccctcagaagattggaaaaagattccccttcttcctgggaagttgtagcttgcgtcagcacatataattcaatcgtgagaatgcaggctgggtttttgcccccacttggctgagtgaagtgtacagtgaacaacctatgtaactatttgctggccctggagccgactctgccccagagtctgggtgccaggtgctttgcccgcatggcccatttcagtcacgctgcagtcctgtcaggaaaaaatcagtgttattctcattctacatatgagaaaactgaggcttgcagatataagggccaaaagttacacagctagtgagtgatggggctgagtttcagactccacagtctcttaaccaccaagcagcatgcccagagtagaggtgagaaggaaggagagagctgcggtccacatgagcatctggacctagcatggacaactcactcctccctggctctcgctttgttcttgttgcgggtgtggtggtggtgggactcaaagacggtaaagatagctttctctcctccctggggaatctgggggttgtttaaaaggcctgctcctcttttagaaggcaggagggccccaagggaagcagaaggtgacagaaggggaaagggtcctctgatcattgctcaccccacagagatcttgaaaggaggggtcttgatccagcggaacccccagctctgctaccaggacacgattttgtggaaggacatcttccacaagaacaaccagctggctctcacactgatagacaccaaccgctctcgggcctgtaagccatgcccctccctgctgcctcttctctcagacagcctgaccccagccgcaaactcccaacttacaacccagtgcctgcccgccactgccccagccgcctacaccacccatttcctccctctctgtccctcctgccatctccctgtgcctcttcatctctggggttctctgtcttgtctccctctgcttataggttgtgcctctggtttgggggcctctcagcctgtctgggtccctcccttgctgtgcagttggcctcgtggcctctgctgctgtttgtgcctctctctgttactaacccgtcctctcgctgttagacatctctctcactgcctgtctctggttctgtcctcaggccacccctgttctccgatgtgtaagggctcccgctgctggggagagagttctgaggattgtcagagccgtgagtctcagggaggcctggagtcagggaaggggagggctggggccgggtggaatgcaggtgtcatacaggtgacatgggaggggtgggataacaggcttgggatgtctcccctgggccaggtagtctccctagaaggtgatgctgatgagggtctggtgcccagggcgccactcagccctcatcctgccctttgcccaacagtgacgcgcactgtctgtgccggtggctgtgcccgctgcaaggggccactgcccactgactgctgccatgagcagtgtgctgccggctgcacgggccccaagcactctgactgcctggtatgtgcctctgctttgtgcccaatgtgctctaccccccaggatgcaaggggtgggcaccctgcctggtactgccctattgcccctggcacaccagggcaaaacagcacagtgaaagccagccacctgtccccccaggcctgcctccacttcaaccacagtggcatctgtgagctgcactgcccagccctggtcacctacaacacagacacgtttgagtccatgcccaatcccgagggccggtatacattcggcgccagctgtgtgactgcctgtccctgtgagtgccagggagaaacacagttttctcattttggtggggaggtttgtttctgtaaatgggagcatatggggagcactgtctgcatcttgctttgagagctggtcatgacagttcctgccgagctgccttgttctttcaacagctgtggagcaggtggcagtaaggagaggcagctaagagcccagacttgggagccagactgcctgggtttgaaacccagctctatcaattagtaggcacgtgaccctcttgctgtgcctcagtttcctcatcagtaaaatgggggcaagaatagtcccaactgcataagatggttataacatttgaaagagttaatatttgtaaagctcttagaacggtgcctggtatgtactaagtgctcctaaatgttagcttttattctatagcctggtgaggtcagttttacctttcgttttgtttttgagaccgaatttagttagctctatcgcagtggcgcgatctcggctcactgcaacctccgcctcccaggttcgtgctattctcgtgtctcagcctcctgagtagctgggattacaggcgcccaccaccatgcctcgctaaattttgtatttttagtagagacagggtttcaccacgttggccagactggtctcgaactcctgacttcaggcgatccacctgcctcggcctctgaaagtgctgggattacaggcgtgagccactgcacccggacttttttttttttggcagagtctcgctccattgcccaggctggagtgcagtggtgcaattttggctcactgcaacctctgccttccgcattcaagcaattcttgtgcctcagactcttgagtaggtggaactacaggcatgcaccaccatggctgggtaatttttgtatttttagtagagacggagtttcactatgttggccaagctggtctcgaactcctgacctcaagtgatccacccgccttggtctcccaaagtgctgggattacaggcatgagccatcgtgcctggcctagctcagttttatttaacagatcacctatttactgatgggcgtttatggactgggctcagacctggggaacctctttcctcctctcacaggaacaggagtgggccttcagatcctggctgactgtgttagggagaggacaaaatgtagagccagaccatttgggttcaaatcctcgctcctccactcactagcacaatgaccttgaataatttacagaactctctgctttggtctccctttttgcaaaatgggaatctcacagtgctgatcccgtctggttgttgtgaggggtaaatggatgtcaggtgctgatgcgtggtagggcatttaagtattggttgatattattcttcttgtgcctgggcacggtaatgctgctcatggtggtgcacgaagggccagggtatgtggctacatgttcctgatctccttagacaactacctttctacggacgtgggatcctgcaccctcgtctgccccctgcacaaccaagaggtgacagcagaggatggaacacagcggtgtgagaagtgcagcaagccctgtgcccgaggtacccactcactgcccccgaggccagctgcagttcctgtccctctgcgcatgcagcctggcccagcccaccctgtcctatccttcctcagaccctcttgggacctagtctctgccttctactctctacccctggcccccctcagccctacaagtgtccctatatcccctgtcagtgtggggaggggcccggaccctgatgctcatgtggctgttgacctgtcccggtatgaaggctgagacggccccttccccacccacccccacctcctcagtgtgctatggtctgggcatggagcacttgcgagaggtgagggcagttaccagtgccaatatccaggagtttgctggctgcaagaagatctttgggagcctggcatttctgccggagagctttgatgggtaagagtgggcacgatgacctgagacagtgtcagggcagacagagtcctgaggatccagatgtggcagcatctcttggggatggcaggagacagaagtggggggatcaagaatgcaaagaaagcagatgggagaccagaggagcagggcctttggtgggtgggggtgattatttttgtaaatgacatgctatccgtgaacaaggacttgtatggaggtcagaccatctagataaagtaaaattccctttgagttcatagcagctttattcaaaatatccccaaattggaaataactcaaatgtgcatcactaggtgaaggaataaacaagtggcagtgtatccatttggtgaagttctacttagcaaccaaaggaaatgaactaccgatacaacataaatgaatctcagaaacattacattgagcaaaagaagccagagacaagattccatactgtctgatcccctttatgtgaggctctgaaccgaaaaaaccactctgtggtgggagagatcagaacggtggttgccccagggtggggggcttcaaaagggaggcacacaaggacatttctggggtaatagaaatgctctgtatagtgattggggtagtggatacatgagcgaatccatttgtcaaaactcatcaaactgtgtgataagagtctgtgcattttatttatttcattttattttttgagatagagtctcactctgtcagcaggctggagtgcagtggtacgatcttggctcactgcaacctctgcctcctggattcaagcaattctcctgcctcagtctcctgagtagctgggactacaggtgtgtgccaccatgcccagctaatttttgtatttttaatagagatggggtttcaccatgttggcaaggatggtctcgatctcttgacgtcgtgatccgcccacctcagcctcccaaagtgctgggattacaggcatgagccaccacacccggtgcattttattgtatataagttatacttcaataagaaatgaattggggccaggcacggtggctcacgcctgtaatcccagcactttgggaggccgaggcaggcagatcacttgaggtcaggagttcaagaccagcctggccaacatggtgaaaccccatctctactaaaaaatataaaaaattagccaggcttcctggcatgcgcctatcatcccagctacttgggaggctgaggcaggagaattgcatgaactcgggaggtggaggttgtagtgagctgagatttcgctattgcactccagcctgggcgacagagtgagaccctgtctcaaaaagaaaaaaaaaaaaaagggtcaggcgccgtggtgcacacctgtaatcccagcactttgggaggctgaagcaggaagattgcttgagcccaggaattcaagaacagcgtgggcaacatagtgagatcccatctctacaaaaaaacacaaaaaattagccgggcatggtggtacgcacctgtagtctcagctactagggagactgaggtgggagaatcacctgagcctgggaggtggaggttgcagtgggttgaaatcatgtcactgtactccagcctgggtgacagaatgagaccctgtctcaaaaaaaaaaaaaaaaaaaaaattccctttcacacttcctttacctccactcccctttccagagggggccatggttaacagtgtgtgtgttcacctagaccgtttatgcatctgtagacacacacacagtgaagtgtggttttcgtcgttttggtggggaggttggtttctgtaaatgggaacatatagggagcactgtctgcaccttgctttgagagccggtcatgacagttcccattgaactgccttgttctttcaatagctgcagagcaggtggcggcaaggagaggcagctaagagcccagacttgggagccagactgcctgggtttgaaacccggctctaccacttactaggcatgtgacccttgtgctgtgcctcagtttcttcatctgtaaagtgggggcaagaacagtcccaacttcataagatggttataccaccatgcctggccagatgattataaagtttgaatgagttaatatttgtaaagctcttagaacagtgcctggcagatactaggtgctcctaaatgttggtttttattatgtggctgggtggctcggggttttatttaacagctcccctatttactaatagacatttagatcatgttccattttcactcttacaaacagttccactttgtgtgtggctctgggaacatgggccagtgtctccctaggccacattcctagaaataagatttcttttcttttttttttttttttgagacagagtctcgctttatcgccaggctggtgtgcagtagtgtgatctcggctcactgcaacctctgcctcccgggttcaagtgattctcctgcctcagcctctcgagtaactgggactataggcgcgcggcaccacacccagctaatttttgtatttgtagtagagatggggtttcaccatgttggccaggatggtctccatctcttgacttcgtgatccgcccgcctcggcctcccaaagtgctgggattacaggcgtgagccactgagcccaggcagaaataagatttctagatcaaaggatataaatactgttttgatagatgttgccgaactaaggcctgggctttgaagcccaggatgggaacagctgggctcgatgggcaaagggtttgagtgaaggcattcatggtggggagtggctggcatggccagtgctgggagtgatgtccaccctgttcctggccctgctgactcctctcctgacccctccagggacccagcctccaacactgccccgctccagccagagcagctccaagtgtttgagactctggaagagatcacaggtgggctctgtctctgcatcctgttctgcaggggctgggagtccttgtcctgtccccactcctttaatctcaccctctgcctgcaggttacctatacatctcagcatggccggacagcctgcctgacctcagcgtcttccagaacctgcaagtaatccggggacgaattctgcacaagtgagcactgagaaagagggggcctgatggggaggagtcccagggaggagtccctgtgggaagctttgggcctgagggagtactcctgtagcagtaacctttccatgaaagtctgcagagtgtgctggggatggaggaagatgagaatagcctttgctgaccgggaaggggtccgtggtaaggtgcccacctttctcccatagtggcgcctactcgctgaccctgcaagggctgggcatcagctggctggggctgcgctcactgagggaactgggcagtggactggccctcatccaccataacacccacctctgcttcgtgcacacggtgccctgggaccagctctttcggaacccgcaccaagctctgctccacactgccaaccggccagaggacgagtgtggtaagacagggagcccagtgtgcgcactccccatctgccagcacacagcagtgcccagggggccctggcagcagcgttcttggacttgtgcagactgcccgtctctgtgcacccttcttgactcagcacagctctggctggcttggcctcttggcatggcttctctagctgggtcctacctgccttggcatccttccctccccctctgtttctgaaatctcagaactcttcctctccctacatcggccccacctgtccccacccctccagcccacagccatgcccacagccagttccctggttcacttggacctggggcctcccctaaaagtcccctgcggtcccttcctcctcactgcagtgggcgagggcctggcctgccaccagctgtgcgcccgagggcactgctggggtccagggcccacccagtgtgtcaactgcagccagttccttcggggccaggagtgcgtggaggaatgccgagtactgcaggggtatgaggggcggaggagagggtggctggaggggtgcatggggctcctctcagaccccctcaccactgtcccttctctcaggctccccagggagtatgtgaatgccaggcactgtttgccgtgccaccctgagtgtcagccccagaatggctcagtgacctgttttggaccggtgagctgctggcgggctcagagctgggtggaggggggcagcgagggggattgccagggacttggcaggatggcgagatgcagtagggtgtgctatctggtaaaatatccctggagagggctcagcgctcagacctgaacagcaacagagtggcagaaaaggggcctgggggacactggggcccttcagactatgaaaaggttctaaggaggtctgtgttggtggctgtgactgtggctgtgctagggtggtgagccctgtgggctcaggcgtcagactacctggattcagacccagctcctgcttccaaccttggttttttattcctaaaatgggtattgtaataatacctaccttgctggggtgtggcaagaatgaaattaaacagggcttggcacagtgaagcacgggaaaggctttctacagagcagtgactgttgttactcgctgttacaccttaggtaatgcgttttcctctctgggtgcctcccattttctggctcaagtccctgcccaggatcaagcttggaggagggccccgagggaggggccacagagactgggtgaagagcaagggtgtttgtcccaggagcatggcgaaaattgctgctgggtggccttgggaagcacaaaggggacccaactaagggcctgatcctactgccctgggggtgtcagtgccagccccccacaaatcttttctgccccccccaggaggctgaccagtgtgtggcctgtgcccactataaggaccctcccttctgcgtggcccgctgccccagcggtgtgaaacctgacctctcctacatgcccatctggaagtttccagatgaggagggcgcatgccagccttgccccatcaactgcacccactcgtgagtccaacggtcttttctgcagaaaggaggactttcctttcaggggtctttctggggctcttactataaaaggggaccaactctccctttgtcatatcttgtttctgatgacaaaaataacacattgttaaaattgtaaaattaaaacatgaaatataaattaatgccctagcagttctatccccactgttaataatttgaaatatttttcctctagttatttttgtctgtgcacattctaatatgtatatataagttaacatatattaatattattctccagttatttttatctgtgcacattttaacacacacacacacacacacacacacacacatatgtatttttagacggagtttcactctgtcgcccaggctggagtgcagtagtacaatcttggctcactgcagcctccacctcctgggtttaagcaattctcctgcttccgcctcctgagtagctgggattacgggaacgtgctaccttgcctggctaatttttgtatttttagtacataggatttcaccatgttggccaggctggtctcgaacccctgacctcaggtgatctgccagcctcggtcccccaaagtgttgggattacagcggtgagccaccatgcccagtcatatatttctttttaacaaatagaatcatagatcatacatattgtttgcaaattgctttttctcactttccagaaccttgaaatgtttttccatgttctaacatggtgatctaccttattcttttaatttttcttatttagttgtctttacacatgaaacacatgaatacatccttgtgataaacattttcagtaacataaaagtataaatgttacaaagccaacgtgccctttcactcaactccctgtccacccagtctctcctgtctgctgggagaaccaccgcattgacttgtgtgttcacccttccaggctcttttctgcacacttatatagacatactacatttatattaggtcgagtcaaataagattgctgtttgtgtaaaccaaaaagtgtcaagagcctgggcgcagtgactcacacctgtaatcccagcactttgggaggctgaggcaggcagatcacttgagatcaggagttcgagaccaatctggccaacatagcgagaccccgtctctactaaaaatacaaaaactagccaggtgtggtgatgctgttctgcactttgctttccccccgacttgaggtatcctttcttgtgagtacagacggatctaccacctttattttttttttaattactcaacctgtaacatggatgtaatttcactttgtttttgagggatattgagcttgtttccctgtttttgcagtttattgcaattgagctccacacacaagtgagccctcttttgtatgccccctagtgggaatacagtgctggcaatgtttatcacaaggatatattcatgcatttcaatttaaagacaactaaatgagaaaaattaaaagaatatggatccaggctgggcatggtggctcacgcctgtaatcccagcactttgggaggccgaggcaggcagatcacctgaggtcaggagttcaagaccagcctggccaacatggcaaaaccccgtctctactaaaaatacaaaaattagccaggcgtggtggtgggcgcctgtaatcccagctatttgagaggttgagacaggagaattgcttgaacctgggcagcggaggttgcagtgagacgagattgcaccagtgcactccaacctgggcaacacagtgcaactccttctcaagaaaaaaaagaaaaaaaaaaagaatatgggtccagatccatatggatcctagatccagatcacggtgttagaacatggaaaaacattgcaagattctgctaagtgaaaaaagcatttgcaaacagtatgtacagtctatattcagaggaggaactgctgggtcatagatgatatttcataggtattgccaaaccgttctctggagaagtggtatgggtttaccctgggattcttctatggagggaatagttgagctcccgggcttgctcttctgggtgcccctccccgcttcctatccaccacaaggagctgcaggggagcggggcatgccggttccttggctggagaaggagtctccttgtgaggtggtagaaggagcactgacggccttgagcccagtttctgcctttgtcaaatggggataatgacccagccacacccctcccagggttgttgtgaggctggaaaggtggttcccaagagggtggttcccagaattgttgatgagactgtttctcctgcagctgtgtggacctggatgacaagggctgccccgccgagcagagagccaggttggcctggaccccaggatgtacccttcattgcccttcactcccccactggatgctgggtggtcactgctgtagggaggggaccccctgacatatgtcccttcccacccactcttccactgtggaacctcctgtcattttccacttcaccaagtgacagaggacctgctcagatgctgaggggaggggactgcaaggaaagatggctaggaaacccagtccctccacaccctagagtaacttgatgccttgtgagggacacaggcaaagttcaattccttggaagtcaagggagactgagaagagtacagctgcagcactgagggagtgatgaattcttaactggggatggtgggaggcttcgagtgggaggtggcatttgagctaggctttgagagaggagcaggtattgcacttgcatttaggtagaaagcattggggtgcaaggtgacactggagggggaggcatcaggaaatccaggatgtcttcaaagttctggtgtcgggggctgttgagtaagcacaggaataagggggtcaagttagagtcagggtggggtctgacctggatgccataggacctgatccccaagccacagggtgggacttgactgggcagtggggacctttggaaaggactttggggagaaaaacagactggagtctgtcttaggcgatcatcggtccgtgaaatgagcatgtgttacaggcttggtatgtaccagaccctgtgctaagcaagggggtatggagaggagagggtgacaagaatattggatcaacacccgggagctccatctatcccaggatgcactatcttttttttatttttttgagacggagtctcactctgcctgcaggctggagtgcagtggctccatctcggttcactgcaacctctgcctcctgggttcaagcgcttcttgtgcctcagcctcccaagtagctgggattacaggcacatgccaccacacccagctaatttttgtatttttagtagagacggggtttcaccatgttggccaggatggtctcgatctcttgacctcaagatccgcccaccttggcctcccaaagtgctgggattacagacatgagccaccgtgcccagccagatacgctatctttttattgagtgattgagacagggtcttgctctcttgtccagtcttgaatgtggtggtgtaatcacaggctcactgcagccttgacctcctgggctcaagttacccttctgcagtagctgggactataggagcgtgccaccacgcctgggtaatttaaaaaattttttttgtatagacagggtctcactatgttgcccgagctggtctcaaactcgtgggctcaagtgatcctccagttttggcctcccaaaatgttgggatcacaggagtgagccaccactcctggcgatgagccaagtcttttttttttttttttttttttgatatggagtcttgctctgttgcccaggctggagtgcaatgacacgatcttggctcactgcaacctctgcctcccaggttcaagcagttcaagcaatcctcctgtctcagccccccagtagctgggattacaggcatgcgctaccacgtccggctaatttttgtatttttagtagagatgaggttttgccatgttggccaggctggtcttgaactgctgacctcaggtgatccacctgcctcggcctcccaaagtgctgggattacaggtgtgagccatcgtgcctggcggagccgagtcttaaaagatgaccctgtggagaaatggtggtccaggctgaagggacagcctatgcaaacactgggaggtgtggaaaatcatgacctgtgggtggaaattttggctagaacatcaaaatcatcaggtgtacattcctgtacccatgcagcagtcagaatctctgggggtggggccccaaaattgtatgcatacagactgtgtgctgatttgtgatattacttaggattttttgactttacaatggtggaaaagcaataatatacattcagtataaaccgtactttgaatacccatacagccattctgtttttcacttttatttttatttatttatttatttattatttattttgagatgtcattttgctgttgttacccaggctggagtgcaatggcgcagtcttggctcaccgcaacctccacctctcaggttcaaacgattctcctgcttcagcctccagagtggctgggattacaggcaggcaccaccacacccggctaattttgtatttttagtagagacggggtttctccatgttagtcaggctggtctcgaactcgagagctcaggtgatctgcccatctcagcctcaagccaccatgcccagccctactttcagtattcaataaattacatagccaggcaccgtggctcacacctgtaatcccagcactttaggaggccaaggtgggaggatcctttgaggccagaagctcgagaccagcctgggcaacatagtgagaccccatttctacaaaaaataaaaaaactagctgagtgtggtggcgtgtgtctgtagtcccagctacttgggcagctgaggtggaaagactgcttgagcccagaggtcagggctgcagtgggccatgatctcaccactgcactcagcctgggcaacacagcaaggccctgtctcaaaaataaataaataaataacacaaacttatttaacagtttactataaaataggctttgtgtcagatgattctgcccaactgtaagctgctggcagtgtaaatgttctgagcacgtgtaagccaggctaggtgtcttaaatgcattttcagtttcaacttagaattggtttatcaggacgtagccccttggtgttgaggggcatgtgtattaacagtctccttagtgacttttttttttttgagatggagtcttgcactggccgtagtgcagtggcacaatctcagctcactgcaacctcttgtctcccgggttcaagcgattctcctgcctcagtctcccaagtagctgggattacaggcacccacaccacgcccagctaatttttgtgtgtgtgtatttttagtagagacgggggtttcactatgttggccaggctggtctcgaactcctgaccttgtgatctgcccacctcagactctcaaagtgctaggattccaggcatgagccaccgcgcccagagtccttagtgatttttacaccatgaattgttgaagccctaagccagagccaagggcaagagtatagagaatctggagatgcggagagggttctgattgcctacaaggagtttggactttattgtggaggcagcggggagccaaggcaggttttagagtaggagagggtccaagcctgtgggtcacccttccgacttccctttccgaatgccaaacaccttcatgtcccccgtgggccccctttgtccctcccaccccaaactagccctcaatccctgaccctggcttccgcccccagccctctgacgtccatcatctctgcggtggttggcattctgctggtcgtggtcttgggggtggtctttgggatcctcatcaagcgacggcagcagaagatccggaagtacacgatgcggagactgctgcaggaaacggaggtgaggcggggtgaagtcctcccagcccgcgtggggtctgcaccggcccccggcactgacccaccaccccctcaccccagctggtggagccgctgacacctagcggagcgatgcccaaccaggcgcagatgcggatcctgaaagagacggagctgaggaaggtgaaggtgcttggatctggcgcttttggcacagtctacaaggtcagggccaggtcctggggtgggcggccccagaggatgggggcggtgcctggaggggtgtggtcggcagttctgatgggaggggcaagagctggaggcagtgtttgggggagggcagttacagcggagaagggagcggggccaagccctagggtggtgaaggatgtttggaggacaagtaatgatctcctggaaggcaggtaggatccagcccacgctcttctcactcatatcctcctctttctgcccagggcatctggatccctgatggggagaatgtgaaaattccagtggccatcaaagtgttgagggaaaacacatcccccaaagccaacaaagaaatcttagacgtaagcccctccaccctctcctgctaggaggacaggaaggaccccatggctgcaggtctgggctctggtctctcttcattggggtttggggagatatgactcccgcaaacctagactatttttttggagacggagtcttgctctgtcacccaggctggagtgcagtggcgttatctcggctcactgcaacctccacctcctggactcaagcgattttcatgcctcaggctcctgagtagctgggattacaagcgcccgctaattttttttttttttttgagacagagtctcgctctgtcacccaggctagagtgaaatggtgcggtctcagctcagcctcccaggttaaagcgattcttctccctcagtctcctgagtagctgggattacaggcgcgagccaccacgcccggctaatttttgtatttttagtagagatgggatttcaccatgttggccaggttggtgtcaaactcctgacctcatgatccgcccgcctcggcctcccaaagtgctgggattacaggtgtgagccaccgtgcccggcctaatctttgtatttttagtagagacagggtttcaccatgttgtccaggctggtactttgagccttcacaggctgtgggccatggctgtggtttgtgatggttgggaggctgtgtggtgtttgggggtgtgtggtctcccataccctctcagcgtacccttgtccccaggaagcatacgtgatggctggtgtgggctccccatatgtctcccgccttctgggcatctgcctgacatccacggtgcagctggtgacacagcttatgccctatggctgcctcttagaccatgtccgggaaaaccgcggacgcctgggctcccaggacctgctgaactggtgtatgcagattgccaaggtatgcacctgggctctttgcaggtctctccggagcaaacccctatgtccacaaggggctaggatggggactcttgctgggcatgtggccaggcccaggccctcccagaaggtctacatgggtgcttcccattccaggggatgagctacctggaggatgtgcggctcgtacacagggacttggccgctcggaacgtgctggtcaagagtcccaaccatgtcaaaattacagacttcgggctggctcggctgctggacattgacgagacagagtaccatgcagatgggggcaaggttaggtgaaggaccaaggagcagaggaggctgggtggagtggtgtctagcccatgggagaactctgagtggccacctccccacaacacacagttggaggacttcctcttctgccctcccaggtgcccatcaagtggatggcgctggagtccattctccgccggcggttcacccaccagagtgatgtgtggagttatggtgtgtgatggggggtgttgggaggggtgggtgaggagccatggctggagggaggatgagagctgggatggggagaattacggggccacctcagcatgtgaagggagggaaggggctgcctgtgccccaccttgcagggtctgtgcacttcccaggattagggaaagaccgggtagggtctgtctcctggcatcacatctccccctgctacctgccatgatgctagactcctgagcagaacctctggctcagtacactaaagctccctctggccctcccactcctgaccctgtctctgccttaggtgtgactgtgtgggagctgatgacttttggggccaaaccttacgatgggatcccagcccgggagatccctgacctgctggaaaagggggagcggctgccccagccccccatctgcaccattgatgtctacatgatcatggtcaaatgtgcgtggctgagctgtgctggctgcctggaggagggtgggaggtcctgggtggaggagcccacaaggggcatgaaaggggaccaggatgtatgtagacccaggagccctagtatgttaggagcctcaaaaccttcttgtatcccttttacagtcaaagtccaaagccactcttgaggaacactcttgtacaaaattaagctgggcacagtggctcatgcctgtaatcccagtacttttggaggctgaggtgggaggatcccttgaagccaggagttcaagaccagcctgggcaacatagtgagatcctatctctacaaaaaataaaaaaattatctgggtgtggtggtgtgtgccagtagtcccagctactcaggagaggctgaggcaggaagatcacttgagcctagtttaaggttgcagtaagctatgattgcaccactgaaatccagcctgggtgacagagcgaaacctcatctcaaaaaaataaaaaagcaaacaaaaagaaaaaaaaaattaaaagggaaactagaagagatgccaaaggttctggctgaagaccccagagtctggtgctacttctctaccacctgagggctttgggctgtcccttgggactgtctagaccagactggagggggagtgggaggggagaggcagcaagcacacagggcctgggactagcatgctgacctccctcctgccccaggttggatgattgactctgaatgtcggccaagattccgggagttggtgtctgaattctcccgcatggccagggacccccagcgctttgtggtcatccaggtactgggcctctgtgccccatccctgcctgtggctaagagcaccctcctgcagagggtgggaaggagagatgagtccagtatgccaggcccctcacggaaggctgcatgctgggctggggaggggccaccatcctgcctctccttcctccacagaatgaggacttgggcccagccagtcccttggacagcaccttctaccgctcactgctggaggacgatgacatgggggacctggtggatgctgaggagtatctggtaccccagcagggcttcttctgtccagaccctgccccgggcgctgggggcatggtccaccacaggcaccgcagctcatctaccagggtcagtgccctcggtcacactgtgtggctgtctgcttacctcccccaaccccggtggactagggtccctttctctgatgttccctcaactgtcacctctcaaggaaaccccattatccctacaaaaaattcttactgccttccaacccctgtgaccccattctctccacggtgactgtgtcataccccaaaggtgacctctgtttttctcctgtgaccctgtcaccttccatggagtccccatcccagatccgtgagtgacccccatcatgactttctttcttgtccccagagtggcggtggggacctgacactagggctggagccctctgaagaggaggcccccaggtctccactggcaccctccgaaggggctggctccgatgtatttgatggtgacctgggaatgggggcagccaaggggctgcaaagcctccccacacatgaccccagccctctacagcggtacagtgaggaccccacagtacccctgccctctgagactgatggctacgttgcccccctgacctgcagcccccagcctggtatggagtccagtctaagcagagagactgatgggcaggggaggtgggaccttcagcccagggtccactgtgggggcagagggagtggcagagacaccggggttccttcccctaatgggtcaccttctcttgacctttcagaatatgtgaaccagccagatgttcggccccagcccccttcgccccgagagggccctctgcctgctgcccgacctgctggtgccactctggaaaggcccaagactctctccccagggaagaatggggtcgtcaaagacgtttttgcctttgggggtgccgtggagaaccccgagtacttgacaccccagggaggagctgcccctcagccccaccctcctcctgccttcagcccagccttcgacaacctctattactgggaccaggacccaccagagcggggggctccacccagcaccttcaaagggacacctacggcagagaacccagagtacctgggtctggacgtgccagtgtgaaccagaaggccaagtccgcagaagccctgatgtgtcctcagggagcagggaaggcctgacttctgctggcatcaagaggtgggagggccctccgaccacttccaggggaacctgccatgccaggaacctgtcctaaggaaccttccttcctgcttgagttcccagatggctggaaggggtccagcctcgttggaagaggaacagcactggggagtctttgtggattctgaggccctgcccaatgagactctagggtccagtggatgccacagcccagcttggccctttccttccagatcctgggtactgaaagccttagggaagctggcctgagaggggaagcggccctaagggagtgtctaagaacaaaagcgacccattcagagactgtccctgaaacctagtactgccccccatgaggaaggaacagcaatggtgtcagtatccaggctttgtacagagtgcttttctgtttagtttttactttttttgttttgtttttttaaagatgaaataaagacccagggggagaatgggtgttgtatggggaggcaagtgtggggggtccttctccacacccactttgtccatttgcaaatatattttggaaaacagcta

SEQ ID NO: 37 - DNA, 23984 bp, Homo sapiens
ccgccccgcgcctaggctgttgctggccgcggccgccgccctcccccggcccaatggcgtggcggcacagtcagtgatgtgacgctcaggcttgtccggcccccggctcgcagcccattacaccatccgtcgcagcagtcgctgcagccgctgcagtccgagccgactaagggcgggaggcagctcgggtggcggggcgtggcgaacagcgcggccggattcattcctttggggcgcggagcatggaggagctgtgcggccgcaggcggagcagggcggcccgggcggcggtggggacaacggtttccctttgaaggggacggacaaagcccgagtgaccagcggcggcggggaggactagtccccgggcaggtagtggcggcggcagcggcctgccagggctcgggccggggcctgaggtgcccgcggaaggcctgggcgggaaggagggcgccgggggagccgaaggcgggcagcgggctggaggccacagcttggcccatcgggagggggttgtggtcgatggaggagattgggagggggctgccgttgtctggaacagggagaggggaaggttgtgttggggcgactgtggtttgaggaacctgcggatcatcccttggcggggggtggggggtgatcgaaatggggcgggcgaagttaatgactaaaaggcaggcggatttcctgagagccgtgagtagttttaaaggaaagagaatctttcggggcacagttttggccttagccggggtttggtgtgtccgacctttttgttctttctcgaaacccggcctcaggccttccagcctggcgcccttggccagctctcctgcagttgcaagaaagagaaacatttctgaacccgagtctcctgcctctttcggttgtactctccctgggcgtgtgcaaagcaaaactagaacaaagcttggctggttagagctggaggcgagaaaacgggctgcctgtagtgtttaaattttccgcacatggaggagactgcctgcgaccagaacatttgggtctctgtgtatccttctgtatttttctttaccaccttttctttgggggtggggggggtgtgtgggatggagtagtgcctgaagtatagcttttattcctttcttcccacagaagtggaaattaagaagtgttttgccttcttctatagaaaattaaatgctgctactttttttttctttctctagtttggtgccctggttgtcagatgttggaaagcagtaggacggaacatactcttcgtggttgtgtatccgttctggggtgcagcaattaacattggactttggttcctgtgactcttgcctgtgtcgatagagttaaactggagctctgctttgaaagataaataaagcacagcctctcaactggacataaatggatctaaagacagcagtatttaacgcagctcgggatggcaaactccggcttctcaccaaattgttggcaagcaaatccaaagaggaggtttcctccttgatctctgaaaaaacaaatggggccacgccactcttgatggccgccaggtatgggcaccttgacatggtggaattcctcctagagcaatgcagtgcctccatagaagttgggggctccgtcaattttgatggcgaaaccattgagggggctccccctttatgggccgcttctgcagcaggacatctgaaggtggtccagtccttgttaaatcatggagcatctgtcaacaacacgactttaaccaattcaactcctcttcgagctgcgtgtttcgatggccatttggaaatagtgaagtaccttgtagaacacaaagctgatttggaagtgtcaaaccgacatgggcatacgtgcttgatgatttcatgttacaaaggacataaagagattgctcagtatttacttgaaaagggggcagatgttaatagaaaaagtgtcaaaggtgagttcagcttctttgtttttctaaatgtctaccacttattttcaggaagtttgatacatcattataagcactggtgttgagtaaaccagcattgacagacctgttttgattaggtaagtcttccagtatgactttgttgagtgtttctatgatgtttggtaatagattgaaaaagtgtgataaaagacttctgttactctgttaagcagtattttctctcttatttggagtaacttaaaattcttgggaaatgggttccccagagttacagagcatgttagtggtagctgatctgagcctttaggcttatgcttaatctacttgggaatatggttaaatgtaatacatttttcttagctttttgttttgttttttttttttttagaacaaccttggagtagaaattactatatttattgagtcatggtcttgtttgttctaggcagtcatttcactttttctgtcagagaaggctaggctaaactgacctggaaggattaatatcagtggaaaggagcaaatctgttcccttattctatatttgtttgtggtcaatagataatccttttataagaacatgcattaaatatagcaagagagaaaacacatttttaaaactgcttcaatactgagagtgaagaacaaggactagattaaacagatgtggatttgttggctagcaacagtgtaaacacctttgtccagaagaagggctccggtttttgattgtgtataatttttgttgattgtaataaactaaaagcagcaaaaagtagtttagaatttttttaacccttaaaagcaactgccttgatagcataattttgatacttgaaaaccttaacttcccttacacgaatctatttatacgacagcaaaataattcactacctaatttttaaaagccattaaaatttaaaagtagcatatagacatgttaaaaaaaatcaaacagtgtaaattggtttacattgttggtttacatttgaataaaaagtcttattcctgatttctagatctctaatgcgctgacaaccactatttacagttttttatgtgtccttttagagttggtctatgcaaatacaagcatacttgtctatgtacaagcatgcttgtttgtgtagccctccgtctagtggttgattacatacttttttatctttatttatttttctaaccttggatgtcattcaactccaacacacatagctacctcattctgttttgtggctatacagtatttcattgtatgaatgtacataatttatctagtctctattggttgatatttaggtcacatccagtactttgctaatataaacaatgctgctgtgaacattcttgaacaaaaatgtgtcttttcacgcttgtgtgagaataactgtagtataaatacctgtgttcagaattgctaaatcaaagtgaatgtacatttgcagttgtgatagtgtctgcctttcagaaaggttaaaccacacaattatggggcactatatagttactgagcatatttgctgtagattgtgtgatcttttataaaaatgatacaagtgtgatcttttataaaaatgatacaagatcattgtgatttttctgaatttttttttccagaggaagtgtaaaaatcccacaaaatcccagtactcagggataatacttccaaagatatttctgaattttgcatactgatatatgtatgcagttttatatgctgttctataacctgttttttagcttaataaatgttatctttaatattaccaattatagctctttaatttcaatagctgcatactcttctactgatggagttttatgttgcttccagtttttcagtatgataaaaaatgtttctgtaaacattctttctaataagtgttttcatttgttcctgattatctttagaggtggcttggtagatcaaatgacagcatggcttttcttttttctccaaacaattatcattcttttgaagaatgcttgttttaagacaacaaattactgctgaactaaccatgttaatattgggaatggtttgaaatcatggctgcttgtttaggtttgttgaattttttgtttctttgttttgggctttttattcatcagcttgatgtagatattattgataaactcatatttaagtcaaattgggatatgttttaaaagcctatgttattggagagatgagaactggtattacttccgttatattttccaaagcttctttatgtacttgtggagatatagtatatgagagaactctaatataaatagctcagattttttcagcattttctcctgagaagctgtgaacagtatttaacttgattacctttgagctctttcaaaacaatgttccctttatcaccactatcatcttttagccttatatgtgagggtatgtctgttctctcttttggccaaacttattctaagtcatttttttccccagtatcagtatctaatatgtatgtctttaaaaaaactacatataacatgagaaaacaatttcatgccaaaaattgttttctcgtaacctcaactttatacccatacacatgcatatagatattgtcacttcatgtgcagaatttttaccttttcatggtatctgttaatttccatagtgattcttcatgaatgttgggggcagattaaagtacatgttcatcctcctccactctgatcctgaagcttcactgctcattctctcattggttctggatttttttctatgggttaatggtaacaaaagcaggaaccaattgaaactaaggcagggacactggagaaggatgtgatttagcagcaagagaggatttttccccacttttttagccccattcaaaaagtagaaaagattaataagactagagttaaattagaataattccttaggacattttgtgtgtcattcactggaaatggttctgaggaaagaaaatgtcagtacattgtgcttggtctgcttaaagataaaatgcatgtgacttctacattccattacttttaaacaggcggttgatatttgaacatgttatttaacctcttttcattactttttaacaggctattggcattttgaacatgttttaacctaaggtggaattcactaattgagagagcagttgttgagtcccgcagtgtgccaggctgttagacttaggatatacaaagagcaataagacaagatagccagtccttgattccctgctcttgaggagctcatggtttgattggagagacaggttcataagcagatacttaaaccacagtatggtaagtgcaacagtagtactttcttctattagatatttggaaatgctttatccccaacaacttataacctgaggggacaatggttttcttcttttcccatggcattccaaaaggggagaaaatctttgatatatttaggaatacctcttcagtttaacagtcatagcaattgagttttgagacgggagttggttcctatttaagaatctagactgtaaatctgtagtgattaggtgagtccttctcagagctatcacagtgatctcagcgcttcatggttatagtcatctttggcctcctttggttcttttgtttgtgttttggggttgtttttgtttggacttagaactttgcagatccaaagttaagtcctcttcaattccacttttacaccctaattctaacagaaattgagcagctaaaagttcttgattcagtactacagaccaatagaaaacgctgtaggctcagatttggagactggctctagaagacattctgtcctcattcatcagtcagtttagatacccaaagtaattaaataaattggtaataaggtaattaacatgcactttctgtaggcaaggcattctgtgggacattttggaggttatgagaagatacgaggtgtcacatttttaacttctgaaggaatagtataagcaatccatgctataggattttagagcgggtgtactgactaggaatgcttcatggagaaagtagaagttaaacagggctttgaattttggggtttagatctatggacaggttggggtttagatctgcagaaagtttattgggatgtggatctgtggaagggttttggcagttttgaaggtttaggaaatggcataaggaaaggcactttgaagaatatgcttggagggtccaggaattggaaagtaggcatattagaactaaaaggcactcagggctgaattttaaaggacatttaatctaggtacaggagttggattttatttttcatgccagtaaaagtttttcagcaggggactaactggagtggtttgtttgtttgcttgtttgttttcagagaaacttatctaactgcattctactacaacactgtgacatctaaccgcattctactacatagtctttgaggctaaagacctagtgtttttaccccatgcattaggaagagtatctggccctaaatgagcttgttgagtggacatgttggatttaagagaggaaagattataagctccttgatggcaagcactatgttttataggcctttctgtagggaaataaatacatgcatgaagacttgaagtaacaaagtaagacagtagttggacaaaaatgagtagcacaggtagaatataggggttcagaaaagggagaaattcatgtaggcatgtggcaaggattgctagcattaaaagggtttgagagaactagttcagacagattatttgccttttcattatggaaattttctaacttacacagagagaatacattgaaccactatgtattcatcatcttacttcaacaattacccatttgctaaagtttaaaaaaaagtttctactttccttttgttttctatagtagtttaaagcaaatccaaggctttatattatttctctctcatagaatgggcatttagaatatagatgtattttagtcaaggaaatgctaaagaaaaatcttatttaattccccactgtaaatgcacaagaatctcaaatgagaaaatctctcttgtaaactaaaaactgttggtattcagatagactaagataatgattgatgtcattctaggttattttagtatactttagtactatctgagtgttgaaagctgaagttctcttttccttcttgactttgaaaactcttctcagctgttggttacctcagcacacctacttacagagaaaaataaaagggggaagggagggacttattctaatatatctatatttattttgattgagtaatgtttaaataacttactagttgaagtcattaacactttaatcccaaattatgaagttactcctgtaagttgctctgtgttcattcttttccctcttgtatcccctggcacacttttctgtgtccttgggaagaattagtatcttagttggataaactaagctgtagatggtgtgcaaattgagtccagtagggaaatatccatgtggtcctttgtccctggagattggattttgaactgtgaatcctcacagaattgagcagtttggtgagaatgagtagatcctgagcactactgctgttcatattgttcgtggcagtaacatgagcttaagatagaagttacgtttcacttactggccttcgggtacaatgtagttccttcactggttcattttttatcagattttcattgattggttgataaaatatgtttgtttgaaataaaattcaggaaacccagggcattacatagatttatgctgttgaggcagcaggaatgtatgtgatggaagatagaagtggaagagatagggagagacccagatgaaaaagtcagttggatgcaaatctgatcagaacatgtcttccttctttttttcctccctttgggaagagctgtgattgaacagggagtctgtgaactagaggacagggaattataatgttgaagttttctgtcattagatgagttttttacacataattagttgcttttagtcctcatcccttagctccagtgctcttagccttgaaaattctacttaacatcgagactcatttcaaatgcaattcttcatctccctcaggttataagaatgcatcttacctctttggatgcagatattttttagcgtttaactttgttgtaagctcaaggacctttattgttaaatttctgtttgttctttgctcagtgccttatacaaagaattaatgaagggagggcacatagtaagtagtcttggcacaatttatcttcttttttttaatttccttttttttgaacttctgttcttgagtatctctcatgatagactacacatggggaagggaaacattctaagcagagaatccttcttctagtgctcctttgataccctaagttgtttttttccctttatcccttcttacctcctccatcaacctacacctgttagttattcagggaataaaatacttggaatcagcattattgtgcaattgaaccacacaccctatcctcatcttacaagtggaccacctctgtactcagcccaaccccagctacaaagttgaggaaggaatgggttggtgccaagcatagtaggctgaagaaagagagatgaggactgtttttgtgtctttccaaataaatgtattataataaaagaccctctaattgctgcttctatcagtcaacacttatactttcaccaaaaatataatatttttattttaattggatttttaaaacagccttattgagataaaattcacaaaaccacttaaagtgtatacaattcaatggcttttcagtatgttcacggggttatacaaccatcacaactatcagcttttcatcacccccggaaaaaatctcatatccattaagagtcactccctcctatccctcctcattcccctgaaactgcactagtcttaggcaaccagtaatctcttttctgtcttaagtttgcctgttctggacatttaatttaaatggaatcacataatatgtagtcttttgtgagttgtcttgttacttagtgtaatgttttcaaggttcatccattttgtagcatgtatgagtgcttttctttttattgcagaataatattccattgaaatagatatatcacttttattcattcagcagttgatgggcatttgggttgtttatactttttagctattcatggataaattcttctgtggatatatgttttcatttctctcaggcacatacctaggagtggcattattgggttgtatggtaactcttttaacaggaaccgttaaactgtttttcaaagcagttgtaccagtttacattcctgtcagcaatgtaagaagagttccagtttctccacaccctctccaacacttgttcttcttcttcttcttttttaatatagccattttaggaagtgtgtagtgatatctcattgtgattttgatttatatttctccaatcgctaatgacgttgagcattttttcatgtacttaattcgtgtggttattggctctctctgtctctattttctttggaggagtttcttcattaacctttgcatgttttataactgggttatctttgtattactgaactgtaagagttgtttatatattcttatgtatgtcttttatcagatatatcatttgcaaatattttctctcattctgtgtttgttttttttttttttaacttttttgatggtggtgtttataccaatttggatttttattttacaaacggatttttaaggaaatttatgtgtcacttatataatgtcttacttaaacaagaaaattgttaggaatagactgcagaatttactgatactatgccatttactatgcaggaacttttccatggatgaaactttgtaatctaattgtaaaacacaaccccttcctgctttggcatatggttaaacttagagtaaagaggaatgatacaattttatttctatatggtgtaaaacagggctgtgacctagccctccttttaaatttatgttcatatgacttgatattgctattagatatattagctatgtggcaagtatctatatagcaaacaagaaaataagaatccttctctattttcttgctactcaaggaccagcagcgtaggtatcacttggatccagcctagatgatctgaatcaaaatctgcattttattatgattctctggtgattttatacatgaaagtttgagaagcacagctttatttgacttatgctaaacacacacacaaagcttgaaatacatgaggaatttacaaacggcagaatctactgtgtttgttaaatattttgcagtccttaggaggacatttttgtttttttataaagagcagtaaattctgtctactccgtgagggtggtttagaaactgacttgatcctggtgaatcttggtaattttatctaaattgagatatttatatgttatgttgaagctcttttatgatttagatggttggttggtaacaatcacttgcccttatcaaactcaaaacgtttggtttggacccagataattcttaggcctctaactagttcttcctcaaaatacagctatgtttttgggttacctaatttgaaaaaaatgttgattctattcctaggcacctaagcttcacagttgaacatgaatttttaatgtcttactcacctgctattaaaagattacaggtgtctttaaaattaacagcagtgaagattggcacttcagatgcttcttgaggaatactaccaccctttaatgcacgagcacttaccatagtttcctgaccttaatattcatcccagaagcatcccagtgaaaatggcacttttcattcttccagattttctttgcattgtttttgtgttaaattatgaatttgaaaattaatgtattcgtatcatactgttttagctttctagagaaatgctttaacagaattaatacttaatgttgtgccactaaccggatttctaagaaatgcccatttaacaaacatgtcttttgagaaatcatgaaattttttttttttatgaattcagtgccagaatattttttttctccaaatgaactttttcttaatcaggcattgagaattgtttaatataatatgtttttctttttctcttccttttttttctttagccaaaggtaaattcattaaatttcattgctgcatatccttaatttcatctcagattcctggtaatatttatttttgaactttgtgttgttttattgttcattgtctttctcattctgagaatgcgaaaagaagacatgatgtggagatggaaaatctttgggaagtacgatcgctgtattatgggaatgtttttaaagggcctgtgtaacccagagaaaattcttgagctaaatctatagtacttggcatatatcgttatgcaccaaaactttaaatcaattatgttaactagcaaaaaagaaaatatgattttaatgatctttggcatgtaacagtacatactagtcacaagaccctggtaactcactttttaaatttggcttgttatactttttcacaaaaaattacatttaatacttatagcatatctagcacttgaaaaaactgacatagcaaaatatttacggtaaatttaacaaactggttatcattttataaagtgcttatacatagaaagccagattaatctcagaaactgaaacatagacatggcataaaagaaaataaagtttataaacagatatgagaaaatattctatttaccaaggaatagaggtaatataaattaaaaagttaattttagtagtagaaagaatactataaagtggaactttaaacaatttttataatcccattggtagtgaattgaagatgtctattaagccatcacacatttgtgattctattttaggtaggcgttaatttttttgtcatttgtttattgacttatttacatgcaataaaattcatactttttagtgtacagtactgtaatttttgacaaacatatactacgcatttattaaaggtaagaacaaaaatgtccttcatgctcctttgcattaaacccctctcctagcccccagcccttgccaatcactgctctgttatctgtccttatagttttttaagcattaattttaatagtaaaaattctgaagcagtgcagatgtccatcaacggggaaatgtttatgtaatgtatgacttgctcccttgcttgaactttcaccataaaaccattaagaaggattatgtagaatctgtgtagttacagaaactatgcagacgatgtaataacacatgacagaatgcccaagatgtaggtgaaaagcaggaaacagttatatatatactgattataactttgtcaaagcatactatataaaaagacttggagaaatgacacaaaagttataattgctttaagatcatgccttttttttttcccctctgttttctaagctgtaagtaataatgctctaggctataattaaaaaacttacctttagggccttccagggcagaaaagtgtggtggttatacacttaacctgttagagtaattaaaaagatctccttctaggatattactttttgaacttattttgtctgcaaaagctaagattgaattactttttgtgatatcaaatattaaaaatttagaatctaccttagctttagcaggttgctagttgcttctgggatataagaaatataggatctgtatactttaagaatagactgtttaggtaagaacttatttgtgaagcagtagcattatactagtgtaaggtattataatagtagatgttatgtgaataattattaggatgactcatatatttattcaccaggcattctcacaatgataaaattgatatgataaaaccaggaaaacctctttaagcagttgaaatttctagtgagatttgaaggacaagaagttaaaatggtaaagaaggaagtgctttataggaaaatcaagaacagaggcatagaggtggaagtgaacagggctgtttgttcttggtgctgggagaagtacttaggatggaataatgtgaagcataagcagaatttctcccttgtgtgtgggagatgcagaccatgtctccgggttagagcaggtttggcaaactatggcccagggttcaaatccagcccaccccatttcagtactgcctgagagctaagaaaggtttttacatttttgtaatggttgagaaagaaatcaaatgaaaaatattttatgacacatgaaaatcaaattttagagtacaaaagtaaaagttttgttgggaaacagccatatccattaatttaacatactaccatagcatatttcatggtacttggcggagtttagtggttacaacagagaccttatagtctagaaacctaaaatgctacctggccttttaccggaaaagtttgccagtccctgagttagatgcacagtgaatcattcattccagagataatgagaaatgaagctaaagagatagggtagggaaatatttgttagtcttttaaaatacgtatccttgaatatccaatattaaactttactgcacataatgttttctgaaactatagatttcttcctcattgctctctccacacagatagtgctttgagaatcaatgatgtagaattttgaaggccatctcaaagattgtctgcttttccttagagaaattgtgaaagttttttgagttggaaagtgatgtgattggttgaagttctattatgaggtttggttttatattagatataatttattcattgaggtttaatatgactggcatttaaaatatgaccttagaaatgagtagtacactgaattggcagttgggagacaggagtttatgttttcccactaaattctcttttctatttgtatgtagaatgagtttatcatctctaccttgcaaagttattaatataagattaaaagggggcaacagttaaataaaatgtgggaatataaaaaaatgctgtattcgcatacgtatcccttttttcattaattttttttttttactgtttgcttctactttctctaatttaatttactgttttttcttgtaacttctttagatggaaacttagctatttaaaaaataagcctttctttttatctaatttattatttagtgctttttatgatcacccagttaaaaaaattttctgattttcattgggcttgcttctttgaccgacgaagcaagtgagtattaaaaattcaaatagacaggtttttctagttatctttttgttttggatatctgacttcattcataagtggacttagaacatactcagtgacttcagtcccttgacatttgttgagacttgccttacggccaagaatatggtcagtatttggatatgctccctgtatccctgggggcaaaattgttttctatggttgttgagtgccatgttcttttatttatgccagttaaatcaagtttgtaatgttcaaatcttcatccttactggttttggtcttctaaactgagaaagatatgtttagatgtactaatgtttgcagatttgtttgctttcctagtagttctgtcgatttttactttacgtaacttaattctatgttattaggtgaaaacaagtttaaaattattatatctgtatattttgaattttttaacattataaaatatttccttttttcactaattatgtattttgcattaaagtctactttcatattttaatatcagacagcttcttaatatttagtttttgcaaagggcatttttttcccaaactttcacttctaaagatcattttctacccatatatttaaggtgtgtcttgtaggcagtgtgtcttgagttttctttgtatcttcagtctgacagtttttgtcttttaagtttttgtcttttctttgtatcttcagtctgacagtttctgtcttttaaatgtttaaattaaacatttagtttacttacatttaatgtaattactgatatttttggattttcatctcctgggtacttttctgatttttatttgtcctgcctgttttgtgttccttggtcttcttttttgccacttttggattattatttcatttttttctatatgttagagaaaatgtagttatgtgcataccctctattattttagtagttattctagatagcattactttgacttatcaaaggctaacataaatttctaattttatgtctttacaagaaagagatcttagaacacgttaacaccaattaccctccataatttcgtggtattgctgtcaagtgttttatttctatgtatgtatttcaagccctacaagatattatttttaaaatcagtatttatttagatgtactcacaaatttaccctttttgttgatgtttttgcctatatctccaggcttccacgtggctcatcttccttctgcctaaagaacaccatatagtatttagatctgctggtaataaatatcttaattttttccttttcatttctttattcctgaaagggttctttatttgacatttattcttgatatgggtatagaattttttctaagttggcagttacttttctttcgtgcttttaaatatcatttactgtctcctagtttctgttgttcctgatgaaaactttgctgtcagattgttgctcttttataggtaacttccattcattctcttgttttaagatttttctctttgtccttagttttcagcagtttgctgtgttgtatgtcaatgtgtttttctttttatttgtccttcttggagtttgtaaaacctactgcatttgcagtttaagctttcatcagcttctgaaaattcttggactttatcttttcttaaatattgctttgggacccatttttttgctctagaattctggttttgagtatgttaacaatattctgacgttgttccctctttctcttatagtctccatcttttctgttcttttaccactccctgcttctttctgtatattttcatcgtatttaccttccagttactaattctctattcagctgtgtgtaaatccacttttaaagccactcaccgagtttttcagttctagaatgtctacttgattagtttccagttttctgttgaattctcaattttaaaaaactcctcgaatatgctaagcatagttattatttgaaaatctgtgttgataaactgcattatctgggtctcctgttgggcttttctgtcagctctttatttccattgttttttgtgttatggttcctcattttcttttcattatttttgattggataccaagcattacatatgaaaaatataaataatttgaaccctaatatgataatatcttcctctaaatagtatttatatttgcttctggcttttaattctgtatactagtcatcctggattatttcaaatcaataatgagatgatcttaaattcgatttaagtttttgcgatagctagtctatttgcagttaactttaactccctagggttaaagttggaggtttaacccaaagtgtggggaattttctaagttcctttcttagtaggctgtaggctccacttttcccctctatccctgcaaggctgtcactagttctgctcagtgtttcagctagctcttccagaattggtggaggccactgtgggaaagctgcctcaaattctggacttgacctctctagttttttcttctcctgcatattgtccccttgttatgtcttaaatcctgtcaagcagatttttaaaaataaatttttcagtttttttagttgttagtgggagggtgatcatgttacaggtatctctgccattactggatgtgaaagtcttccttattgtttgtttttttaaagctactttttttctcctggtatgtgggtgtattcaaaataaatatattttgtattttttcgataaatacagaaatagagttcatttaattggcttttgctacctttttttttttttttttttctgagacgaagtctcactttgtcaccaggctggagtgcagtggcatgatctctgcttactgcaacctccacctcccaggttcaagtgattctcctgcctcagcctcccaagtagctgggactacaggcgcgtgccaccatgcccagctaatttttgtgtttttagtagagacaaggttttaccatgttggccaagatggtcttgatctcttgacttcataatctgcccacctcagcctcccaaagtgctgggattacaggcgtgagctaccgcgcctggccagcttttgctacattttattcttgattttgtgctactctgaatagagaaaagtgccatctaagccatttctttatattcagatttctcttatattgcctatttcttagaaaaacatggggaatagtagaggtccttaatacaaaagagtgtttaaaatatacttggtgtagtagtcatgtttaattgaaattattttaaacaaatgaacatcgatagtcagaagttctgggctctttcagtgcttggttagcttactcattgttaaaacattttatcaaacactatttcattgtagaccattgaaatcttgggtcagaataattatatagtccttgtagatatcatagaagacgaaacaggataaacttgtggaaagattcaatatttcttataataacttgtttttttctaactttagttacaaagtagatttatttgaagtattcaggtttaaaatactttctggtacacatgctatgttgagcatccccaaagccacccccaaatttggaagtaactcaccatataactgtactcataggtaagatttattactgtaatgtcataaggacatgcagctgaattatgaggggtaaagccgcaggtgaagtgtagagaaatctttgtgtagatgtttttatgctttgttcctcttgtgaggggtcacatagagcatattcttccccagtaatgtaaatacatatgtgtcatgtttctaccaaggaaaacccatgacagacccagtgctcaaggtttttactgggggctggtcatgtaggtaccctgtgcctagctcatacccaaaattctagactcccagaaggaaaccagacattcagcataaactgcattgtttctacatacagtttaggtacagtgagatacccttatcatttagggaaagttttagatcagtatagagaactatttaccagccaagttcccagctaccagccaaaggtccaaccttgcaagaaggtctttctaaggatagcagtctcagcctgccatgctacctcttttctacagacatgcctaaaatgactgactgttgaaattttatgtaaacattgtatgtaaataccagaggtcggcatgataattcctattttgacgattagtaaaatgtttatcattaaacttagctaaaatacctggtgtttccgatgtcttaatgtgtttcatacaggcttttactaatgtgccagtgcctgttgtcagttttaatctgtgtgtgggaagaaaaggacagtgttagaacatttagtacagctataaagaatgtttaaaaagttaaattataataggaaataatccattatgaaaggacacttcagatatctccttttaaagttcatattgaaccacccgcatatttttcagattccatggatttgtttttcttacgagagctttttggggaaagtcctttgttaccaagaattttggctaagacagttgaaattcaacttggcaatcagaaataaatattgaaaaaataatttctgactactattagagtcaaaatgaagaatcttagatatattaaagagcagtctggccaggcattgtggctcacacctgcaatcccagcactttgggagactaaggcaggagcattgcttgagcccaggagtttaaaaccagcctgggcaacatagcaagacctggtctctaaagaaaaaaaaaaagaccaattccttgtttataaatgtggaaactgacctggaagttaagtgacttgtcagtaaaatggtgaatagctggttatttgtattctaccgatttttagataataaaatatgcactttaaaacattaatgaaaaatacgaagagaccatggattagtttgaatttcttctggtgactttggatgtctttttacacctaatttggtcatgtcatttattcaataagtttaatatcagatactagttttaggtactgggggaatttttttttctcgtttgtaaaccaagtatgtcctacttaggaacttaaagcttcctgcttttctttaggttctaaagtgcatatatatattacattatattttggtccctcaatgtatgttatttctttttttctctctctctttaaggtaatactgcattgcatgattgtgcagaatctggaagtttggacatcatgaagatgcttcttatgtattgtgccaagatggaaaaggatggttatggaatgactccccttctctcagcaagtgtgactggtcacacaaatattgtggattttctgacacaccatgcacagaccagcaagacagaacgtattaatgctctagagcttctgggagctacatttgtagacaaaaaaagagatctgcttggggctttgaaatactggaaaaaggcaatgaacatgaggtacagtgataggactaatattattagtaaaccagtgccacagacactaataatggcttatgattatgccaaggaagtgaacagtgcagaagagctagaaggtcttattgctgatcctgatgagatgagaatgcaggcactattaatcagagaacgtattcttggtccttctcatcctgatacctcttactatattagatatagaggcgctgtctatgcagactctggaaatttcaaacgatgcatcaacctatggaagtatgctttggatatgcagcagagcaatttggatcctttaagcccaatgaccgccagcagcttattatcttttgcagaactattctcctttatgctacaggatagggctaaaggcctgctgggtactactgttacatttgatgatcttatgggcatactttgcaaaagcgtccttgaaatagagcgagctatcaaacaaactcagtgtccagctgacccattacagttaaataaggccctttctattattttgcacttaatttgcttgttagagaaagttccttgtactctagaacaagaccatttcaaaaagcagactatatacaggtttcttaagctgcatccaaggggaaagaataacttcagccctcttcatctggctgtggacaagaatactacatgtgtagggcggtaccctgtttgtaaatttccatctctacaagttactgcaatactgatagaatgtggtgctgatgtgaacgtcagagactcggatgacaacagtcccctgcatatcgctgctcttaacaaccatccagacatcatgaatctccttattaaatcaggtgcacattttgatgccacaaacttgcacaaacaaactgctagtgacttgctggatgagaaggaaatagctaaaaatttaatccagcctataaatcataccacattgcagtgtcttgctgctcgtgtcatagtgaatcatagaatatattataaagggcatatcccagaaaagctagagacttttgtttcccttcatagatgataacttgactgtattttagcactgttaaagcacgaattggtaacagttgtttcataaatgagcactgttgtgataacaccagcattcatttagcttgattgatatcattgtgctctcattggctaaagcattataagcatcaaatttacaacattggtttcccaatatttaatataaatataccatataatatattgtttgtgaattattgagaaatgtaacattcaaatttctaaaattgtctgccaaaggcttattcattctggttttgtttgctgttgggtgtttggggcagagttaaccatttctccatggtgtctttatactttactggtttgtgaattttatacaattgaaagtctttttttcttgcttctttcttctcttctcaagtttcccccctgtttctactttattgtttgtcctaaccatttctactacagttttttccttatggacccatactaggttgtacaaaccttaaggactcgttaccatttgcagttaccataagtgctttatcttctctatgcacaggcttaaacttgactgttgtatgttagcatattttctatgcagcagttggtcaacttcaactcaaaacactgttttcttatgtttgttacaaacttaattttttgaaagtactctgtagcatgacaatttttagagctgcaggttagctattatagctcaagcttttttgtttgtttttttcttcactttcttcacatctgaggtttctttctctaatccactgaaattattgtgtgctaaatttgggaaacagatctattctaactcattaacccagttgaaatttaggtctgtcatcttaatatatcatgcagtaaaaggaagaatctttttaaagtgacccacctttcatgctgctccagcattgtcctgcttgtgctgatggtgtgattaggtgtagagaatttgcttaaatttaacttcaaagttcatcacacagcttaatgagtcacattgaaatactcagtaattgaactgcaaatcacttttagttacaaaaagagctaaagcatgtcagtggcatgatgcttgccaagccagatctaggcatctaggataattaaggtattttagtatgcaatttactgccataatatcaaaggtcagtaacagtgttctttctttcttcaagcttatgtatacctttaaagataacttgcatgaattactttgattactttggtctcaattatttgtcaccccagttaaacatgaaaggttgcagtgcttcctgttcccttactggaagttagctttttcttttctctttcttcctttctttctctcactctttctttctctttctctttctctctctctctctctctcactcactcactcacagatttgctaatgccacagaaagggctcttttaacttaagataagtgaaaagtactaaaaaagattcaggtaattatcattcagcactttattgtaattcagaataaaatttatgatggcatatttgccctgcaaatgtcttaatgaagttgttctcaataaaaagctccttattgatttgagaaaaactcagtttacctgtgagttcaatgagctggatcactcacttggatttttgtgttgacattttattctgagggttgatgttacactatttaaggagtcatcaatgcaaacagtcacattaggtatgtcatcatctttagtcagtaaaaaccttgtaatgaggagtagtaaataaacaagagaacattagactttttggttaaataattgagatttaatttttaaaagatattcttactcatttgctaggttgtaaatttgatttcaccattaagaaaaggtaaattggatataaatgaacgatctccaactttttgatgaagaggttttactatctctcactgtgggaaaatttgatgaaatatttgaactgtcacatatattaagaatactttatgatttagaccaatattctagaaatatcaaatgtcagtatcttgaaatcatctgcctctaactttgtggtataagaattatatatgaataagctattatttttataaaggaaaactttgccattatagtaaattacattagttgatctcgataatttgaggataacagatgacaattgaatttttaattgatttagtatttcctcctcctctttgggggctgggtgggagggcttacatgctcttatagtgaggcacatctcactgttttgcagcagaatttgaattgtgcaactcctgtgtaaagtaaggatttctttaaatagcatttttgcaccagtaaaaatagataacttagaactcagtcttgataactgaaatgacttatttcacttagaatacatttctcccttctctgccatctccacaaatgccattgggaggttttgaaaaaccagttaatttaatagctcaaaattgtccctgattttattttcttttagggaaaattgtttcataaatgtgacactgataaagcctttgtcagaaagtattctcacaattatgagatggattataataaaatacttaaatttgtgttattttttgaaccacagatgagtaaatttaataatgaaccaattacactcttgagtctaactaaactgtacactgtagcacggtgttattgactggagttaatgtgtaagttattaacatttctatgaaaatgcccttttggggcctcctgaattttagatgttccactgttttgatcatttctataaaagaaatggtcattttacttagatgccagtctactttataaagacaaatggattatagacttaaaaatagtcatttttcttattcataaatctgacaggcataaacccaaatcaaagataatttggtgcccattatgaatttgaagttaagtgatagctcacttgtaaagtgactaccttaatgtgtatagagaccccagtctactattatttgggaaaattgtttaggttatatgggaaaagtagctctttaaaaatcatattgcccaacagaaaccttaggctgaatttacaggtatgataatttttgtaattaattttcttagaattgtgcaggctggatgagataatgacatactcttttacactgtaacagcagcattattgcctagaactttaaccattttagagttagatactaaggaaacaaactaattggtcatcatcattttctttttttctttttcttttttttttttttgcccttatgtgtcactaaacaactagtttctctcccttttgtcagttcccattgtgtattttttcaaaagaagtactgtattcggatgccagctaataaattgtcacacaatggaaaatcatatgccacaacattcattgtaaggtttaataaaattaaatttgcacc

SEQ ID NO: 38 - DNA, 79471 bp, Homo sapiens
aaatttcccgggccgggagcgctgggcctgccgggaaggcgctgggacggttacccagcgggccgccggcggtcgtgggcaagcttcgccatgcagagcactgacctaggcaacaaggagagcggcaagatatggcaccgcaagccgtccccggccacgcgggacgggtaaaggccgtggcgggagggcgcgggctgtggaggggatggagaccggcgaggaggggacgccgggcgtcaggcagcgttccgggttctggctctgaccttgccccgcatccctgggttggatgacctgcggtggaacagatggctccggacgccagggtccgcagagatccccttctgagttctgggagcgggggtctggtccgggacagcgcggagcaggaggaggccggtggttctcagacctgggaacttgcggcttttgctgtgtaccgggactctcctgcttttatgatcacggtatcccgctagtgtccctggcacgtagtaggtgctcagtgagtatttaacagttgcagctggagcagaactccaggaggagatgcggggtggaagagcaggacaattctgcctcttccaaaggctgcagtttatccatccttaaatccttggatgtgtttagacgcacaagcattcatcaactatttgttgagctcctactgtgtgccaagcacgcctctaagcgctggggacggcgatggaacaaaacacacttccggttctctggagtttacatatcggcgtgtatgtaggggctggggcgttcattatgcattgctggggggcttctagtacggccagcgctgcttttcattctgttcccagttacctgtcctgtttgaggctcagcctgtcttgtttccctggaagcctttgctacaaagcggtgccatttggatttcgatttctgcacgcagagtgatcttattgctcctaattccctaggatttcacggaaattgcttgagttcctgtttcagtgtgtttcttgttctagcagtgatttttcttttctttgagacggagtcttgctctgtcgcctgggctggggtgcagtggcgcgacctcggctcactgcatcctccacctcccgagttaaagcgattctcttgcctcagcctcctaagtagctgggattactggcgcgcgccactacgcccggctaatttttgtatttttagtagagacggggtttcaccatgttggccaggctggtcttgaactcctggcctcaggtgatccgcctgtctcagtctcccaacgtgcagggattacaggcctgagccaccgcgcccggcctctagtgatttttctattgatcctttggttgcttcttgacaaatcagaattttttttttctcttgagacagagtcttgctctgttgcccagggtcggatgcagtggcgcgatctcggctcactgcaacctccgcctcccgggttcaagcgattctcctgccgcagcctcctgagtagctgggattacaggcgcaccactcccggctaattttttgtatttttagtagagacggaccgtgttagccaggatggtcttgatctcctgatgtcgtgatccacccaccttggcctcccgaagtactgggattacaggcgtaagccaccgcgcctggccgacaaatcagttttaagtgcctactctgtatatccaaagtgcgatgcgagacgttttaccagcagcttgtttggttcctggttactgtcaggcctctttatcaatgccgctgcctcaactacattgaataaaaaattttctctaaagtggggattcctcaagtttttcattttcaaattctgagtttgtgtgaataccactcccacctctggtattctctaaacattctaaaagttatagcccactcgccttctctttcttgatgatacaaaatatctagatatatgtgcaagattcaaaaagtgaaagaaatgggttgattatccaaatgtcttgtttgcttcttccactaaagcatagcttatctttgtgttcgttaaaacccattgttcatgctgtttagacgggcagagagcactgacttggagtcagatgtattttgttgaagtaaatgtccgtttaccaactctgtgaccttggggaagttaatcactaaggctgtcagtggggagaatcagatttaccagacaggttgtcttacacatttggtgctcagtaaatatttgatattcttcttgtgtttgagaactgaggaactctgtcaggcaatctgtgagaatctgaaaggaagttgctctaaaataaattttttacgtgtgatttatatgaaaaatcggaggggcagaatgtcactattgtgattacatctacatggtaggattataattgagtatttgtttcttagtgtatttctatatttttcatattttgaacaatgattgtgtaattttgtagccagaacatgtaataagtgttctagaaaataagactggaggaaaaagttgtttgctctgagtttagttgccatgaaacattttgatattgcttgtcatttctgtatgtttatttttgtgtttttaattccttggggactagataaaaataagcattgttaagaattttgctatttcctttagtgagtctaaaaagccttatgtttagatacacatggagaaaatgtttaatccacttaattcaatttagtatactttaatgaaattataatgaagatagatgtttctaatataaaatccaaaaactaggcaaggtgcagtggctcacgcctgtaattccagcactttgggaggccaaggtgggaggatcacgaggtcaaaagtttgagaccagcctggccaacatggtgaaaccttgtctctactaaaaatacaaaaaattagctgggcatggtagcgtgcacctgtaatcccagctactcaggaggctgaggcaggagaatcacttgaacccaggaggtggagattgcagtgagccgagattgcaccactgcactctagcctgggtgacagagcgagactccatctcaaaaaaaaaaataaaacaaaatccaaaaatttatgaaaaatcaattaagataaaattttcatgattaaaaactattgttgcaataaagaatgggattattctgatctttgtgacgagaatatacgcacatatattattttaaggagttattttgtgctgtaagttaattttataaattttctttcaacagatacagggtatataatccttctctcaaaaagggtaactttaaacacatgtattcttgtctttcctgttatgaaaatagtatgtaatcattaaataacatgtctaaaagatagaaaagtagaaaggggaaaaaaattaaccatattgctattacctgcagacagctgctgttaatatttagctgtattcatctttttttccctatacgtatttttcttttcctttggagacagggtcttacagtgtcacccaggcaggagtgcggtggcatgatcatggctcactgaagccttgacctccccaggctctagtgataatgccacctcagactcctgagtaactgggatcacaggcacatgcaccatgcctggctaattttttgaaatttttctggagacgtgtttggttttgatttttcttctttattttttcttttaattgtgtgtatgtgtgtgtgtgtgtgtgtgtgtgtgtgtatcagtgtttaaaacttcaggttagaatattttcgttttcatttaagtttaatcattacatatgtgtctccagaataagattgaaaaataagctcccttactgttttatatggcagtatgattaatgtgggttttaaagaatgatttcttaaagcatttgttcattcagcaggcatattttgagtgtcttttgtgtgttgtaggccaggtgctggggtacagtaatgagcaagcagtggtcctgtccttacagaactcgcctgccagggtattcatggtagatacattagaaatggaagtaaaactcatgcacgcgtaattcactgtgaaacattccatacacaaaaacaaaatctcataccctgttgttatcacttaatcacagtttataaatctgtttatatgtgtgtttatttttttaatatctgtccttactactaaattgtaagtgccatgaaagcagggaccatatcaattattcttagcacctggcttgttctgtgtctgacacagtgagttttcaagtatttgatgaatgaataaacagtagctattttgataatgagtagcttctgacctgtttttctgaaatcctggtaagattgattctagaggagcgggggtatagcggtagcagtaggagagggaagaatgaacagacgaaatgctttacttgccatatttttcataatatcaagtaatacgtgacatagattcaatgtttgggtttttttctttgacagaattatagtgaacattattcacaacacttccgattaccatccaaaagttttgcgatttttgaatgtggcttttgatggcacaggcgactgcttaattgctggggaccaccaaggaaatatttatgtttttgacttacatggaaacaggtaagcagataccattgatatctacgttctttaacaagttattaattcactgactgttttcgtacctgctattcattattcattcagaaagatttattaagttctattatatttcaggtaccttgcaaaatactgtcataagtgctaaaggacgaaagtgggaaaaaacagaatgataacatggttcacattttaaagaattaaagtgctggttttaatagtatctctagtagtttccttttttttttcttaaatttaaaaatttattattgctaatttttttttttttcttcagacggagccttgttctgtcgcccaggctggagtgcagtgggatgatctcagcttactgcaaactccgcctcccaggttccagctaccgcacccagcccatagttgctagtttgtcaatttctggtacatcatgaggcaatgtagaaataacacagttttctttgcacattgttgttgtggggtgccagatctaagaattttaaagaattgattttcagctgggtgtggtgactcaggcctgtgatccagaaatttgggaggccaaggcgggcggatcgcttgaggtcaggagttcgagaccagcttggccaacgtggtgaaacactgtctctactaaaatacaaaaattagctgggtgtggaggtgcacgcctgtaatcctggctatttgggaggctgagacaagagaatcacttgaacccaggaggtggaggtttcagtgagccgagatcgtgccactgccactgcactctagcctgggcgacaaagcaagactccatctcaaaaaaaaaaagttggttttcactcttcttcctcttctcttcccttgtgaaacaatttagtccgaaagcaattaggtgggattgatggagataggtattcatgcagcggggctaagagggaaggacagctgcagcagcctagcagagaggcagagggtgtctgcatagcgaatggggcagtgatgggaagctagtttaatacagggggctttgatcaactaaatatattagggataatgagggccaagtttctcactcttagaaaagagacttacatatatggagggcagaaaactagaataaaccccatggtattgtattggaattagatatatcagtttgaacccctggttttgaatatatagagatagatatagcactaaatagaggtatgtacacatatatgtacacattccctagcttcgtacacccagagggcctgggagcaacagcatgccagcagcaatgaatatacccggtgttgagttcttgttttcaaaataccactttctactaaaaagaatcaaggatatttgcaaaaatggccaatttcagaatgcagacagggaaagtacaggatgagcctgtaacattttgtagccagaaagaaggaattgttcaaagaatgttcgggatgtgtcaaaaagacacagttgccagcttgaaggagctccctctggtcatattggagatgggtcatgcattgaataaaattgaaatctatgagttcatgttgtaaccagtatacaaacagtttagtaaggcatggatattgaatagtcacaaagtacccccccacaaaatacttattaattatagaagaaaaaaaattatacaatgaagaagcctagcaaacactgccttaatcaaatgactaaagttaatataactagtagtggaatgaatcaaaatttgtgtgccacctgataggatgcagtgaaaagaacacggcatcatttctgtgatattcctcccaagatatataacctgaatctaatcagtgggatcatcacacaaagctaaattaaggacatctaataacaaaactgtgctgatatctctacaagggacaagatcatgcaagttgggtaaagactaaagaactcctaatctgagggggatgaaagggacatgacaaaggcatgaatctggactgatccttttgctataaagaacttattaggaaaattggcaaaatttgattggagttttaggattagatggtggtaatgtataaatgtaatttattggtgctgatggttatattgtgattatgtaggagagttttcttattatgggaaacttgatcttggtaacttaaatagttaaagaaaagatgtgacatataatttacttctctgtgattcattaggtaaaaatctgtaaatcattgtttctgccctttaccaaaaaagtaatgggcccaacttttctaccctttattcttgcttaacttacctcaccaattcctaatcttaaatcagtaccactgtctatttgctaatacttctgaaaaaaataaaaataattgttgattgatttcatgactaatgaacttcaacatcgaggactctttgcacttcatttgcttgtctacggttacttaacgtttcctattctccaccaagtgttgcaaacctttaccaatttccttgtctccttgcattggactctactgttattctgactgccaggcctcctgattcatgggaaaatagataccttcaagctttcctttctccttccccattgcagcctcaagtatattgtaagttcagcccccattaccttattcataaagttcagccctcattaccttattcataaaaacaggtgatcttaatttcttctagtgctaatccctatcttcgatagcctctcctgagatattgcaccataagtgttactattttgtccattcccttttcactgttggttgttggggagaaaaaataatttttcctctacccttctagattctcaactggacccttgtaacaaaagatagattaacaagagaagaatgaataagttattaatatctatcatgcgtgtaacacattagaatacccagagtatccaggtattagtatgagatgttatcaacttgtgtcatgcatgtaacacgtgacagtatccaggtattgctaactcaaaaagtggcttatgctctggcttatatagcatcttcatcaaagaacaatacatttttagagaagtgacaagacaaaagaagaggaccttgagtctctaggggcagcaaattgtgggaaggcaaatatatgggaaactaatggtagttatatacatttctctggtgctattttcagggtgataaagatctaaagtcaactcctgtgatcaaccgttgtccttcctggtagagaagggaagagggacccctttgtaaatgtatgcaaatttatgtaaacttttagacaagagcagagagcttttcttttcttttcttttattcttttttttttttttttttttttttttgagacggagtctcaccctgttgcccaggccggggtacagtggtgtgatcggctcactgtgcaacctctgcctcctggtttaagcaattcttctgcctcagcctcccaagtagctgggactacaggtatgtgccaccacgcccagctaattttttgtattttagtagagacagggtttcaccatgttggccaggatggtctcgatctcctgacctcgtgatccgcccgcctaggcctcccaaagtgttgggattagaggcgtgagccaccgcacctggctgagagcttttcttatatctgctttttctcatttacctttagctcaaagtaatccttatgccaaagtgggatgttcgggatggcatattctgccacccttcactaaaaacatttgtggctgagcagttagcagcagagctgggacttaaaaatcagacttgatcataaagcccagtatactgggctccctaaaaatcttcctaattgttcaatccattggtcacttttcagttctcattttactgaaacagtaaatactcttgtcttcccatcctgcctgaaattattttctttggcttcatggtacagcttttgctgaattttctacctctctgatcatttttcccccttattttactgactcttcttccagtgccttcccctttcatgttgtgctccccagacatctttctttggcttacttccttccatatttcaggtactcttttcgataatcacatcaccaccaagcctcaggcttcatctgccatgtaaacactgttgacttagacctacttctgctactactacctactagaaatcttctagattgggctcccaggagccactagcttgcatgtaagtcttgagcccttgaaaagtgattggtccaaattgagatatgaagcacatgtaaaattaaaatacacagtggattttgatgacttaatatgataaaaagtgtaaaatatctcaataatttttaattgattaaatattgaaatactaatgttttagacacatattgagttcataaagtatattagtctgttctcatgctaataaagacatacccgagactgggtaatttataaagaaaaagaggtttaatggactctctgttccatgtagctggggaggcctcacaatcatggcagaacgcaaaggtacttcttacgtagtggtggcaagagagaaatgaagaccaagggaaaggggtttccccgtataaaaccatcagatctcatgagatttattcactaccatgagaacagtgtgggggaaactgcccccgtgattcaattatctcccactgggcccctcccacaacatgtgggaattatgggagccacaattcaagatgagatttgggtggggacagagccaaagcgtatcatatattatcaagattaattttacctgtttcttcttacttttctaatatggctcctagaaaaatttaaattacgtatgtagcccacgttgtatttctttcagacagcatgactctagatgagtttcacaagggccttaaacaacatgtttaaaagcaggtttattatttcctacccccaaacttattcctcttttgcctaagttcaaaagcttaattttttgtaaattaaactccagctaggtgcccagtactctactgagcactcaacatgtattctttcatttagtcatcacaacagccctgtatctattcttatcttcattttacgcaagatcgggtcctgattccctcttcttcactccatgttgaatccataccgaacctctgcttggcttctgaaacctctcctatttatgctcccatatctctggctgagattttctgtagtaactttcttagtgatctcctttattccttgtccctctatccatttgccattgctgccaggatcgtcttcctaaaacacatacctgattgtgattctgctgtgctaacacttacagtggtttcctattctgataacatccaaactccttaatatggcacatagcacccttcataatctatttttggcctaaaatggtagctcatttttctgggtttcattttcttcgtctctacggactccttccacatggaatttgtaattattggaagaatttgtgatactaatgcaatgatctcttaataggttcaatcttgttcagcgaacagcacaagcttgcacagctctggcctttaatcttcgtaggaaatctgaattccttgtggcattagctgattattctattaaatgttttgatacaggtaagaagttctcctatttttcttttgaagcagagtaaaatataaactgaagaactgcaagaactttatcactctgtacagcttgagggggcagtccccatgacagccctcccttcagacactaggtgcaagctgagggtcctagaaacagcctcactttagatcagttgactacaaagtcagggtttcctgactactgtcaggtttgataatttactagaacaactcacagaactcaggaaagcactacacttaatgacagttttaatataacaaaaggatacaaagtataactagccaaaggaagagaaacatggggtggaatttgggaggcttccaaaagggaagcctccattgtcctcagggatgcattgccctctcagatgacactcccagcattggtgtgtggctggccatctgcgccaagcactgttgacgcagggagtcgacccaagctttggtgtttttggtgttttccctaccaagctgttttctctgcttacaaagatacacacaagtacatcagaatcaagtttaaaaaccaaatgtattatcagtatctcacactgataaacctgttcctcctcatgtatttattatttttttttattttttatttttttagagatagggttttgtcatgttgcccaggttggtctcgaacttctaggctgaagtgattcacctgcctcagcctcccaaagtgctgagattacaggcgtgagccaccgcccggcccctcctcatgtatttcctacctccgctaacagtatcaccatctgcttaaataactaagctggaaccactggagccttcacttctcttatatctcaggacatcaatttgatcactaatattttttgtttttctccttagtagctcttggatttgttcttttctccattgcctctttcttagttgaggccctccatatctcctgtctgaattattacagcaacatataaattagtctttcttgttcaatctcttcccctccaccagatatcctcaaagtgctctttctaaaacatagactagatatggtactcttttacataaaattacctgcaagagaaagcccaaactcactagcatcaattttgaagttattcttcatcaaagcctttgtcagccttgtctcctacatgaatgagatgttgctaacatgttccgtcatacactttatcaactagccacaagcttccatttttgtggatattaatggaggtgcctcatataatacctaaccacccattgcatcagttcatctatggtgtttatatgtaatgttacttctagacgtacagtgttttacctgggtaacaattttactttttaccacagtcaccaaggagctagttagctggatgagaggacatgaatcatcagtattttcgatctctgtgcatgcatcagggaaatatgccatcacaacttcttctgatacagcacaattatgggacttggatacctttcagagaaaaagaaagctgaatattcgccagtctgtgggtatacagaaggtcagtgagggggtacatcttggtctgttgtgcttctcgggctaatttcttggtcaacaggatgtatagatgatataagagtaatgattcactttgtccttgtagctctgtaactcagcaacaagcaaagcaaagtggccaacacaaagatgttgcctatagctacaatttataacttagtgagctcttttctaaaattatagctatgtaacttcaactgtcctaaggcgaaagttatttagttgattgcttttgttttcatttttaaccctctgacattttattatgaaaaatttgaaacatgcagtagatttgtgagaatttttgaacacgtgtacattcagtatctagattctaccattaacatgttactgtactatcctttactctactttacatggtaccatactctcttatgggtctatccatctttctttttttttttggtttttgttttgttttgttttgagacagaatctcgctctgtcacctaggctggggtgcagtggcatgatctcaacttactgtaacctctgccttacaggttcaagcgattctcctgccttagcctcccatgtagctgggactacaggcatgtaccaccatgcccagctaatttttgtatttttagtagagacagggtttcatcatgttggccaggcttgtctcaaactcctgggctcaagcaatcctcttgcctcggcctcccaaagtgctgggattacaggcataagccaccatgcccagctgtgtgtgtgttttaaagtaaactttggtcatcagcatactcccctgtgaatacttaagcctgtacttaattaactaggggtcaatatttgttgatttaaaatttatatataatgaaatatgtaagtcttaagtattcatttgttaaatttgacaaatacacacacctgtgtaacctatgcagctgtagcattacattatcccagaaaattccatcatctccctccctgggtgaccaccactcttacgttttcccaccatggactagtgttgcctattctaaaatttcatataaatagaactatacaataatagtttatgtaaggcttttttcactcagcataattttgtttgtttgtttgtttgagatggagtcttgctttgttgcccaggctggagtgcagtggtgtgatcttggctcactgcaagctccgcctcccaggttcacaccattctcctgcctcagcctcccaagtagctgggactacaggtgcctgccaccaggcccggctaattttttttgttgttagccaggatggtctccatctcctgaccttgtgatccacccgccttagcctcctaaagtgctgggattacaggcgtgagccaccgcgccgggccccactcagcataatgtttttgagatccatccatattatatttattagtagtttgttctttcttattgctgtttagaattccattgtgtaaatataccaccttttaaaaatccatttcttttgtttttttccaactatgtagaaacatatggtatataggcctccagttgtactcttgttctgagccccacagatgccccagtttggttctatcatttcttttaacagacaagccacataaccaacctctctgggcttccgtttcctgagcaggaaaatgggtctgtggtaaccaccttaccagggctggtgagaaaatgagataaaataaataattcatgtcaacggcttggccgagtgccaggcccttatatagtagctcccattgttattttgtcctttatgtcccctggctgtcatctcctgtgatttcctatatgacatccaaactggtctctttcatagggtttccacgctgctacccctcctccctccttaccacacccagtaaccttcccattctctccacctagtcaaatctaaccctttcttcaattgtgataatagttactgaagcatttactatgcttcaggcattgtattaagaactttccatacattatctcaactcagtcctgacactgcctcaatgaagtaggcagtgtttattgctccccaaacacaaagacacggggtctggagactggaagcactggcggctgcaagtgccagagccggcagggtgtgaagccagattggaggctttctgcagagtcaggcctcccaaatcctgggatggagtcaaggagcttttggctgtcccacccttttggtagtgccccggtcactcttcctcctccaagtccccatatccaagcctgtcatatctcttcagctctaggggcctgtctgtgacttccaccctaagggagctggcactttgtgtcatgctacattgtccacatcaccgattccccctccctctctccccttccttcttcctccctgttcttttttttttttttcctttgcaacggaatctggctctggcatccaggctggagtgcagtgacacaatgtcagctcgctacaacctctgcctcccagattcaagcgattctcgcctcagcctcctgagtacctgggattacagtcgtgcgccatgacagccaactaatttttgtattttcagtagagacggggtttcaccatgttagccaggccggtctcaaactcctggcctcaagtgatccactcgcctggtctcccaaagtgctgggattacaggtgtgagccaccatgcccagcctgggcacctgttctgtgccaggctttggtgttcaaaatgttagaagtggagaagtcagaggaagatggaattataggtctttcctcttcaaagctttctgtttggctgattttattcaaatgagcacacaggccctattcctcaaagccacttcaaatgtggcattgctaggttgttttagtccaaggaaggccgtctccttaactcccactgtcttttggttttcaggttttttttctttctatttcattagctaaatattattttcaggagtatctgagtctcttgtgtgattaattattttgcttcaggttgtattatgcatgcagtactgcttttaatttctaggttattaacatgaacagctagcaatgcatgtcaaccaaaaatttactttgtagtctccatggaaatcccagagttctttaatgtgcttttaacaattaaaaagagataaaagttgtgccagcttattcattagggatttaagccaaatgtcttttcttctttaatttaggccaaaggtcttttcttctttaattgctttagtacttacattttgaattttaagttccaaagaagagaacattgggagttgaacccacatggaaacagagttatgaaacaatgacacatgacacaaaagccatctgttctttttactatgaaattaaaatgagtatacgctgaatagttgccaacgcaaaccttgcttggacatttagacattttagtttaaaaattaggactgtggaaaatgtatgtatagtgtgatgtgtgcctaagtatattaatgttagtgctataagaataaaactaaatgtgaaaatgtatgtatagtgtgatgtgtgcatatagtaaattgctctaaaataataaaacaggaccgggtacgggggcttacgcctgtaatctcagcactttgggagtcccaggcggggggatcacctgaggtcagaagttcaagaacagcctcagcctggccaacatggtgaaacctcatctctattaaaaatacaaagattagctgggtgtggtggcacatgcctgtaatcccagctactggggaggctgaggcagaagaatcgcttgaacccgggaaacagaggttgcagtgagccgaaattgcaccattgcactccagtgtgggcaacagagcgagactcttgtctcaaaaaaaaaaaaatacaatacaataaaatacactatagtttaagttatcagcaaatttttcttaaagggccagtaaatatttttgactttgcagttcaagagcaaaattatataaccattcagaatgtaaccatttaaagccaggtacccagctactctggaagctgaggtgggagaatcccctgagccccagaattcaagaccaagatgggcaacacagtgagacccatctcaaaaaaaaaagtgaccattcttagctcctgggctgtacaaagactagagatgggccaggtgatgaccacttcagttgtaaacaggaaataactgtaaccttaatattaaagtaaaacgttcggtttttaaaaaatttttttcccctgacacagccctcaggagagcctgagaacatgtgcccctaaaaacgttaattcttaccaaattcttactaaactcatatttttattacagattctgattctatattttaaatagaacttttatttatttgtttgttttgattgcacatgcgacccttcagtaacttgctttgggtcttttgttatggatttcatttttgatggctcttttaatctcacacagtcttctactttttttctcatgacattaattttctggagagatcagacagaccagttatctcagaaaatgccccacattctggagttgttttttctgtttcatcattattgtttaatttgtctgtctttcacctgcattttctgtaaactagacattaagtctaaaggtttgagtagattcctgttaaacatttttgacaagttatttatcttatgtatgggaaaaaatagtaaacaatacaggttgaggattcccaatttgaaaatctgaaatcccaaatgctccaaaatttgaaattttttgagtgctaacatgatactcaaatatcaagctcaaaggaaatgctcattggagcatttaagatttcagattttcggatcagggatactcaattggtgagtataatgcaaatattccaaagtccaaaaaatccaaaacatttctggttccaagcattttgcataaggaatactcagccgtagcacctccctcagggttggtttcaacattaagtgtgataatctatgcaaagttagcacagtgctggttgtatagtaagtgcttagtaaaattgcatctgttgcaattttaccatcaagcctatgataggattatctcagtgcagttagataatttgcttaagctgtagggtggcaggcacatgggctcatgcctgtaatcccaacactttaacacgcaggctgattgcttgagcccaggagtttgagaccagcctgggcaacatggctaaaccttgtccctacaaaaaatagcctggtatgctggtgtgtgcctgtagtcccagttactcaagaggctgaggcataagaatcacttgaacccaggaggcagaggttgcagtgaaccaagatcacaccactgtgctgcagcctgggcgacagagtgagctcctgtctcaaaaaaacaaaactgtggagtaactgttatttattttttagttacattatattaacaattcagaaacccaaaagtatttaaataactcagtggcaaaatgcgatctgacctcaattcatttggcagcaaaatctgaactgaattgacatgaggctgaaatattaatatatttgagtatggggcattgccccaggtctcctaaagttctacataatgttatagaatatacatcatactacctatctaaaattggaaatctgcattctgaaacacatctggccccaagggtttcagaaaaggaactatggaactttgatttcagactgtttttaaagaacctaccagtctaacctctttccgctgatttttgtaagcagtaatagcagtaattattagtaatagtaatagatacccgttatttagtatgttccatgaaccttcattttaaatagttattttaaagctttaatcctaaagggtagatattattatccccattttacaagaagggaaaccgaagttcagaaatattaagtactttgtccagaaatattaagtaatttgttcagtatcacatagtttaggagagaattgcagtttgaattcaaacctgtctttatctaaagtcttactgcttctcaggtaaaccagttacacctcttcaaattagtacatttttattcttttgttgatgtttgggggtaagatattcagctcattagttaaggattttggaatccccgggatttgtgattactgtggttcagcaggtatcagaaaaggctttgtgatggatatcagaaaacatctaataaagagtgttttgctgaactcaattcagcctgtgtacccaggacactcactaaatactaaatatacaaataatacatttgaccttaacttgctaatattagtatcctaaactctttaaaccttgaaaaagggctgggcactgtggctcacacctgtaatcccagcactttgggaggccaaggcaggcggatcacttgaggtcaggagttctagaccagcctggccaacaagaccagcctggccaacatagtgaaaccccatctctactaaaatatacaaaaaattagccgggcatgttggcacatgctgtagtcccagctgcttgggaggctgaggcacgaggattgcttgggaggttgtagtgagccaagatcacgccactgcactccagcttgggtgacagagggaagactctgtctcaaaataaataaataaatcaataataaataaataaataataaggtaaaataaaccttgaaaagagttcatctacctcctaaaactgaattggaaagcttaggatttttgtgttctacaaggaaaaactacagctccgtccttgaacctaaccccccaaaaagtatactttgttaatgttttgaagtttttcctaaggtttttatgtttctcaagagatgacactatctaaataataatgacatgcttcattaggaacaattttataatcattaaaatatggcaattaaaatcacaaatctagtaatgaataatcatgtaggcaataatctatcacagttattctgctaaaatagcagttgatgctcattaacttttaagcttctgcttttcccagtaggaataaactttattacttttccagaaaaatgactgctaattataataataattttcttaagtcactttttgacatcagttttgaaacagtgttctaatgcgttcattatagattatagaaatctgtaaggccttcatattataaatcttcctaacagtgaatctaatagcaaaagatctaccacagattgtctttagcaaagtgagccaaggaagaagggaggagcttgatcaggcccttgcctgatctgtcagtatctgatgtagttgagttcgtattttttattgtcttattggcattaatcctgagtagattatttttgctaaccagtctgttctctagtgcattatatatgtgtgtgtgttgtacagatgacacacaaaattatattcaaggccactgaaacttttacgagaaaatattggttaatttccgttaataattttgcattaacaaaaggaagcattgtttatgcttatgtgatagaaaaatgaaaattaggagaataaagtgatgacattttcaactttactatcagtttcattctcagttgtccattaaatgaactgaatctgtaataagataggattatatatgcatttgcacctttttactcatataaaaaaatggcttaacacttacttatcctgaaacactttgcccagtattcccaaaggactaacttttttttcttgagatggagtttcactcttgttgcccaggctggagtgcagtggcgcaatctcagctcattgcaacctccaccctccaggttcaagtgattctcatgcctcagcctcttgagtagctgggattacaggcgtctgccaccacacccggctaatttttgtatttttagtagagacggggtttcaccatgttggccagactggtctcaaactcttgacctcaggtgatccacccacctcagcctcccaaagtgctgagattacaggtgtgagccaccgtgcctagccaggactaacttttaaaagcaaactgactaatttgggaagatatatattttaaggctgttgacacatatcatataacatctttaaataatttttactcccagcggcagtgtatgacagtgcctttttttactctatatatagtatatgtagaactatatactaatataaacactgtattaaatactaactactgatagatgtttaaaaaatatcaaatgttggtgaaagtatagggaaaagacactgtcatacactgccacggggagtaataaatacatacaccccattttgtgggagtaatatatatagacaaacaccccattttgtctatgcatgtatgtgctttctttttgaagacagagtcttgctctgtcacccaggctggaatgcagtggtgcaatcttgacttactgcaacctccacttcccaggttcaagggattcttctgcctcagcctcctgagtagctgggactacaggcacacacccggctaatttttttttttttttttttttgagacgaaggctcactccctcacccaggctaaagtgcggtggcggggtcttggctcactgcaacctccacctcccaggttcaaacaattctcctgtctcagcctcccaagtagcagggactacagatgcctgccaccatgcctgagtaatttttttatttttaatagagacgaggtttcaccttgttggtcaggctagtcccaaactcctgacctcaggtgatccacccgccttggcctcccaaagtgctgggattacaggtgtgagtcactgcgcctggcctaatttttgtattttttcgtagagatagggtttcaccatgttggccaggctggtctcgaacttatgtcctcaagtgatccgcctgcttcggcctcccaaaatgctgggattacaggtgtgagccaccacacctgaccaatgtgctttattttaaaagtaaaattgatactcaaaattatatcttgttttcatttaactctttagtaatattaggtgaaattttttaaactgtcatttagaattttgtgacttgcctagtcattatagtgtacctagttttcgtttgaagggttttttttttagttaataataatttatgaaataatcagtattactccttgtcatatattagaaatgtattttccccagcttaagaaaataatattttaataaagaaaaatagactacttgtataattttaaatttaaagtctctatgtgaaccttatgtgaaaactaactttctctattcctccttaggttttctttctaccattaagtaataccatcctcagctgttttaaagataattccatttttgcctgggaatgtgacacacttttttgcaaatatcaattgccagctccacctgaaagctctagtatattatacaaagtgtttgctgtaaccaggtaatgtgcattttaagacactaggaatatttaagaaatttaatttctggtaaaaaattacaaattttcatttagtttttattcagtatctttttgtcatattagaaaaagttaccttcaaatttagatatgatctgctaactttttttattttgcaaaatatcaaatatacacaaaaatagaaaaatacatgaacccctaagaatttcttctttttttttgtttgtgtgtgtgtgttgttttatttataccagcctttcctccatcagaaccactaaatatttccataagctacaataatcatcaacgaatggccatttcttttcttttcttttttttttaaatggagtctcactctgtcacccagactggagtgtagtggcatgatctcagctcactgcaacctctgtctcccgggttcacgcgattcttctgcctcagcctcccgagtagctgggattataggcacgtgccaccatactggctaatttttgtatttttagtagagacagggtttcaccatgttggtcaggctggtctcgaactcctgaccttgtgatccgcccgcctcggcctcccagagtgctgggattacaggcatgagccaccgtgcccggccatttctatttttatcaataacttcacctacttctccaatgcattgtttgaagcaaaacctaagcatatcattttatccataaatatttcagtttatctctgaaagataagggcgcttttggaaatataaccatagtattatcacactttatttatttatttatttatttatttatttatttatttatttatttttgagacgaagtctcattcttgtcccccaggctggagtgcaatggcactatctcagctcactgcaacctccacctcccagcttcaagcaattcttctgcctcagcctcccaagtagctgggattacaggtgcctgccaccacacctggctaatttttgtatttttagtagagacgggggtttcaccatgttggccaggctggtctcgaactcctgacctctggtgatccgcctgcctcagcctcccaaagtgctgggattacaggcgtgagccactgcacccgacctattatcacactttttaaaaattaataagaatgtcttaatattgtcatatatctagttattgttcaaacatccttgattggtctaataactggtttttatgattgatttgtttgaataagaagcaaaacaaggctcacagattgtattttgttgatatattcgtctttttttttccttatagtttattcattaaataactggtcatttctcctctagagttttctatattctggattttgctcttgtcttcatgtggtattgtttaatatgatcctctgttacctgtatttttcctgtatactggttatacctgtattttctaaaaactggaggcttgatctgatttaaggacaagaagacattataggtggtttgtgtactttcataaggaacaacatagaacagttttcttttgtgacgtcagtagccattagtgatcattccctagatctagtactgccttagaagttagcaaaatgctgctgttctaattctctcatttcttcttcacttattagttaataaccttctatagaaagaaacttcctctcatcaaccctttggttattttgatgtacagttgtaaaggaaaggcaggataaatgcttaattttcccctcttttttcttaaactagtttttgaagtaatgaattggtttattagcatctttcaaaagtggctaatgaagatttttgtcttgaatctttgtaaactcataggcttagagtagttgacaagttttaatacattgcagctgtcattcttagagatgttccaattctctcatctttgactaataggatcctcttttcgctgactttggcatccttttactacaactccagttgcctgtgatagctttcatgctttctggtatgacaagatgttccaagcttatcttgtacaattcccgccctaaccctggaatcagccatttctctaaagagtctgggttcttttttgggaaatggtatttcaagaccctaatccggatgctaggggttctcattttgactgggccaatcattgtttctagtcaggggaaagagttacaaaatagatgttaattcctctcttttctcacgctgttcttctaagtcatcagtaaataccatcaactcaaccaaaccatatagcaaattggtcaatttgtttttattcattgctgtggttattaccctaatccaagctaccctagcctcttttagactactataatagccttcttatttgttctccctgttttcaatctcatttcctatagtcattctctacacagcagataaagtggtttttataaatcagtaagtcagatcatgtcactttcctatttaacctccttcatcacttagagtaaaattcaaccccccacccctcatttcccctgaggccttctgtcacctggcctacgcctccctcgcttcatctcatttccttccttagtctgctctagccacatccgagtatagcagtgtactttcatatggcaatgcacttgagtatgacctcttacttacttttccttatatactaaccttattgctttttcagcacttttgtaccagccagtctggaatactgatcaggatagaattcttcctccaagtcatcccatgactggcctatttgtgtcattcaggtagcagatcttcctcctttcccagctttcatcaccttattttatagttctatatagaacttatcacctgctgagatcaagttcatttatttgtttgtttgccttcctctagaccagaagtcctgtaagagcaggattacttggcttgtgcagccttaactgactgtgtccatggcttctgggaccatacctggcttatagcagacacttgaaacataaccatagtattaccacactttttaaaaattagtaagtcctttacaagttcttgttgaatgagtgagcaacggccttgcaagtcaaaacaacttactctttttgtatcttattaaggtagctttctttgagcaggaaaaaagtttgggctgttttgtttttttcatatagccatgtaccaccaattctatatagctgtacgtgaaatatagaaagttggatagtgataagtgactttgagattatgctataaaatataagtgttatgtgaaaaacccacaatcaggtcattaaacaagtgtttggtaaactggtgccttagcacagtaggtaaaaaaaatatatactataaacctgagctgtccatgcaagtatttgaattaatacaaattaaataaaatttaaaaataaggtccttattaacattagccacatttcaagtgctcaataatcacatgggactagtgtgaccatattgcatagcatagacacagtacatttctgtcatcatagaaagttctgtcggacagtgctgctacaaacaattgaacccgtttttctttctcacttttttgtttatatagagatggccgaatcctggctgctggaggcaagtcaaatcatcttcatttgtggtgcttggaagctaggcagctctttagaattatccagatgcccactaaagttcgagccattcgccatctggaatttcttcctgatagttttgatgctggttctaatcaggttagtaacataaatgtagggcactgtactttttgagaaagaacgcatccgtctctgaactatattagctcttatttatttaacttacaccctggctgttacaataatttgaaattacaaatatgttatttttgtgaagagtctaggattgaaaaaaatttcaaaatcttgtattctttataccattgacaatttgctctttttataaaatcaacatactgtaaatttatattgtactttatggtttgcagtgtgctttagcatgcaatttttcatttgatccttaattctttggcataggcaggaaagatattctccccattttacagattataacactaacgaccagaaacattgactcgtcaacattcctgttaattgtaaggattaaagattggactagaactaaaatgtttttattgtgttgttattttatttatcttaactggttgctcactcctgtgaaacatgtttttattggtatctttccttagtttacagagtgcttcttccttcatcccccttcgcttattcctttttaagacttgagttctgtcaaaccttaactttcttgtttcaaatagactgtcgtggatcttgtattttaacagattagatatatgttttacatatatatgtatacatatgcatgtatgtatatatcatgtccattttacttactttttgattaggtaatatattaacatggttgaaaacataaaacagcatacagtaggaagtctgtcacgcctttctaccatttgtctagttgttcacctccccccatatccactgttgttatatatagtgttatgtttttcccattattttatacagccttgcaccttctattcttccagtttttttgttgttgttttgagatggagtctagctctgtctcccaggctggagtgcagtggtgcaatcttggctcactgcaacctccgcctcccaggctcaagtgattctcccgcctcagcctcccaagaagctggcactacaggcatgaaccaccatgcccagctaatttttgtatgtttagtagagacagggtttcaccatactggccaggctgacctcaagtgatccacctgcctcagcctcccaaagtgctgggattataggcgtgagccactgcgcccagtctaccttttattcttaagttggaaattgttctatatcagtgcagaacttctttctttttcacaactgcatagtgttgcagtttattttttaaaccagtctcctattggcagttaacctatttttagtcattttctgttacaaataatgctcactgaatgacttttcacaagtgtcatttcacacatcctctttgtaggataaaatcccagagttgaaatagtggcataaaggttatgtgcatctgtaatttgggtagatcttgcccagttgacttccagaggagttgcatcaactgcagatgaggggctttgtttcctacaagccaaccaacaggagaactttatagagtgtcacctccaaactgccttttaccatcttttgtatgataagtgacatcagcatttcaagcaatcacatggtggcatcacttaccagccactgccactgggaagagaacctgcacttagacaaggcagcatgggggtttatttgcttaaacttttttattacatttttttttgttttggtttggtttttggtttttggttttgagacggagtctcgctctgtcacccaggctggagagcagtggcatgatctcggctcactgcaagctccgcctcccaggttcacgccattctcctgcctcagcctcccgagtagctgggactataggcgcctgccaccacgcccggctaattttttgtattttttagtagagacggggtttcaccgtgttagccaggatggtcttgatctcctgacctcgtgatccgcccgtgtcggcctcccaaagtgctgggattacagatgtgagccaccatgcccagcctttattacatgttcttaatttttgaaattatgagttaaaatttaaacttttctctccccttaaaagcctagcttccctcctacccctccactacccttgcaactcacaaactctccattctccaaatgttacttaaaatatttgctgaaaacaggcagacagtggggagcctcagtgggagtgacaggtttgtgtgggggtagcagggctgttagctttgattagctatggaaagggtacaggaaggcaaaccctccaccctccttgtttctgatagccagtgtggaggcaaaagttgggaactgtctgtcttagtctgttttgtgctgctgtattggaataccacagactgggtaatttataaacaatgtaagtttatttttcacagttctggaggctgggaagtccaagatctagaggttggcatcttttgaaggcctttgttctctgtcataatatagtagaaggcctcatatgggtgagaaagggagggaggaatgggaggggacaagagggagccgaactcatccttttataccaaacccactcccacaataacagcattaatcttttcatgagggcagagccgtcatgccctaatcacctctcattaggccctatctgccaacactgttgcattgagcaagtttccaatatttgctgttggagagacgcattcaaattatatcattgtctaatcctctctgtcccctgtatatgtcatcagtgggcatgatctgcctgtgggaagggaagattcttagggcacctttccatagtctaccatgataggttccctcctggttctgattagagccagggcataatcaacatgagccataagttgtgattttaaaataggtaatatcaggccaggtgcagtggctcatgcctgtctgtaatcccagcactttcggaggccgaggcaggcagatcacctgacatcaggagttcgagagcagcctggccaacatggtgaaaccccatccctattgaaaatacaaaaattagccgggcctggtgacacatgcctgtaatcccagctactcagcagggtgaggctggagaattgcttgaacccagggggcggaggttgcagtgagtggagatcgtgccactgcactccagcctgggcaacaagagtaaaattccatctcaaaacaataataataataataataataaaataaaatatataatatctcactgagaatagaatttcctctaggtgtccctctcaaaatatatatatttatacacacatacacacatatacacacacacatacatacacaaacgttgcatacacgtaaagacgtgtatatagtaggactttcagacattgactatcacatgtttttaggaatttatattttttctctcttaggttcttggagtactaagtcaagatggtattatgagatttatcaatatgcagacttgtaaacttctctttgagattgggagcctcgatgaaggaattagctcatcagcaattagcccacatggacggtacattgcatctattatggaaaatggaagtctaaacatatattcagttcaggctttaacacaagaaataaataaggtatgtatgatgaagtaatcaacatcagctttttataaacacttatatattatatcatcaagaataaaatctttatgctactatttctaacttacctggaacttatccatttttctggatatattttgttgctcttactcccaaagccacatctctggccttgatttctcacgtatgctccattcttaaattgctgccttcctgagggacatctccgtttgatgtctctcatttaggtgttactcattatctcgttcccaaaagagttctttctgcaattctctctcatgttttcttcccatctcataggctagaaaccttgaagttctatgacttcctatgcctttattttctaaatccagtcaatactaagtcatataacttgtttgtttttgttttgtttttgtttttgtttttgttttttgagacggagttttgctctcattgcccaggctggagtgcaatggtgcgatcttggctcattgcaacctctgcctcctgggttcaagtgattctcctgcctcagcctcctgagtagctgggattacaggcgcacgccaccatgccctgctaatttttgtatttttagtaaagatggggtttcacaatgttggtcaggctggtctcaaactcctgacctcatgatccacccaccttggcttcccacagtgctgggattacaggtgtgagccaccacgcccagcccaacttcttaaatttgaaatatctgtaaatgtgctgtctgttctccacttccataattgctatccttgtattggtcttcattaactactctggactaatggtaatttaaagaaatatcttaaactcagagccctcagtgcttgccctgcccatccttccatcttctaaaataattcatcatcatttcttaactagtgctactttagtggcttccttccttcgcctgttgaattaagtccagactcttctgcctggctctcagtgttctctctaatcttgtctacctgtctaacttatttcctcgaacttatagcttccctcattatccccatagacaccatccttatttctgcatctattatccacaccatccatttcacgaaaatgcatgcctcacttctcttctctggttatctaaaattcccccagctaaccagtcatattgtccgtgtgtcttccagtctgaaattgcaccttggtagctctaacagagactttgatgatcacctggtctaaccctttcattttacacaggaagaagttcgtgctcaaaattaatcacacagcgagtaactagcagttctgggtgttccaattcttccaagattacatgagattgggtgcatttggagtggcgtttgccacctttttttattctaaaaaaaagtttgtgcctcctcctttttgttttatcttttaaaaaattatacaagtagtgtcttattgcagaaaaaaataagaatgtacagaatagcaaacagacaaatacaaatcactgaaagtctcaccattctcagaagattctgatttatatgttcccaatttcttttctatgtgtgtaaatatatatagtcactcctcattatttgtgcattctatacatgagaattcacctgctcactaaaatttatttgtaacttcaaaattaatagttgcagtgctttcatggtcattcagggacatgcacagagcagtgaaaatttgagtcaccagataccctttttcccagctgaagtcaaatgaggcaacactctgtcttcttatttcagctctcatagtgtaaacaagtatcctttttgtgatctacttaataccatttatttttttgcattttgaagctttttgttaagattctactgcttaaagtggtccccaagcgtagcgctgaagcgctatttattgtttctaaatacaggaaggctgtggcttaccttacagagaaaatacatgtgttaaataaactcattcaggaatgagttatagtgctaagctgtgagttcaatgataaggaatcagcaatgtgtattaaataagatgtctttaaacagaaacacacatatatgtattgattgattaatgaggctctcaggaacctgactctgtgtttcccctaggagcagtgtttcagtattcactaatcgagtgttcatggtgactttatagaaccactgcaaatagtgagaattaactatacatatatgtttctgtgtgtacgcacatgtgtgtgtatgcatacttgtctctaaacatatgggattatactctgctgctgttttgctctttatgtcattatgtatactatataagtatatttttacattataatatgtgctatatattaataaatttttttaaatgtattaatatctgctcttactgagagagttttcagcctgctgaatagtcagttttacagtactagctaaaccttcttttctttttttttttgagatggagtctcactctgtcttccaggctggagtgcagtggtgtgatcttggctcactgcagcctccgcctcccgagttcaaacaattctcctgcctcagcctccctagcagctgggattacaggcgcgtgccaccacgcccagctaatttttgtacttttagtagagatggtgtttcaccatgttggccaggctgctcttgaactcctgaccttggtgatccacccgccttggcctcccaaagtgctgggattacaggcatgagccaccgtgtccagccttgcaaaccttcttaatagaggcaggcagagagctgagaaaaactatggtaagaatgagtcattgagttcctttctgcttgttatctgttgagcaaattgatatcacatgaatagaaaagctagcttggaagtagaatgatcttttttattttttgacacattcccagtaccatcagtgtctttatggctgttccaggctacattaatgttcaattctatattctctataaatcataactcacctttgtctcatttttaccagttttattttcttgtcattggagaatttctggtattgtggtaatagagtaaatgaattcttaagtgttgaaggtttaacactacaaaggtatgtcaagtcaggttgtttctcaggttcttttttgggaggttatacttcatggtagaggataaggctcaaacgggaaattgtgacattttaataaattttaattttaataaaattttagtaaatttcagctctcatggtgtaaacaagtatcctttttgtggtctacttaatgccatttttttctgtgttttgaagctttttgttaagattttacttgttaaaatgttccccaagcgtagcattgaagcgctatttattgtttgtaaacacaggctgtggcttaccttacagagaatatatgtgtttttaataaaaatttagaagaatggattgaagtcaaaaaatagtttaaggatattaaatatgggtaatattcataagtcagaccactattaatcccatcccatagatgaattgaagaattgaatcataaactgtaaatggtcattgtgttttaattgtatttagaacttagaaagcctgagttaccttatttgctcacttcctttgaagaaggaagatcttttgatttcaaagagaatattgtttatggagaaaatgttctagtgagtaatgttactttaagtaaattgaagttgttcaggtttttttccgtgtttgatgggccccataaaaatgaaggtataggttctaagtcacattgtctgaactgcttaagctgttgatacaataaggaactaatagtgatcactaagcagattaaaacatttaaccaagggatagaggggcagaggttccatgcttctagaagaaagtcatttggcagtttcctcttagaaatttcacttgaccccaaagaatattagggtacttctgtcagaattctagagggccatacctctaactgtaccttttttgctgtagataataatcaccatactaactttaccatgtatgtgtaaacatgatttggtattaaatgatttaaggccagctttcaaggaataattatatttattgctattgttaatcatgtatctttattatgttcttcaaaaggattcagcagaaatttgctttgatttattagtcaaagcaaatgttcctagacattttacttaagttttttgcctgaagaataattctacatattaaggcatgttattaaagcaaattttgaaaatcatacattaacaggcctgtcttccaaggatatccattagaatatatatatatttatttttccatttagccacctccgcctttagtgaaagttattgaagatttgcccaagaataaactgagttccagtgatcttaagatgaaagtaacatcagggagagtacagcagccagcaaaatctagggaaagcaaaatgcaaactagaatattaaaacaagacctgactggtgattttgaaagtaaaaaggtaagaatatttggtaattaaactttgtcatgattctgctgtagacaagtcttgtgatttctaagccatcaccactcttctctctcttgggaattaaagaaagagaataaaatgaagagaataaagttgtaacctaaattatgcacaggctggtctcaatcctggcctcaagtgatcctcccaccttggcctctcaaagtgctgtgattacaggcatgagctgccacacccagccatatggcagctttgagaaagaaagaaaatatagctattaatagagaagtgacattattttcaagggatttgaaaactttttaatgacaaatataatcacacacatatacaaagtacacattaatatagagctcagtgaactttcacaaaatgtacacaccatgttaccagcacccagatcaaaaactggaacattaccatcagcttattgctccacgctctctctccctcacccccacccaccccagaataactactcgactgatacactgtagattaacttagtaaatactgtcagttttcctaagtggttgattgaaaagtagttgatttacatccctaccagcagtatttgagagttctagttgctccatattctcactaataatacctgatatttttcacattgattttaatacagtgtccttccttatccatggttttactttccatggttttgtttacatgtaatcagctgtggtccaaatatattcaaaggaagatttcagaaaaaacaattcataagttttaaattgcacaccgttctgagtagcatgacgaaatctcctgccatcttgctctgttccacctggcacatgaccatcattctgtctagcatagtcactcagtagcctcttggttatcagatctactgtcacagtatcacagtgcttgtgttccagtaacctttattttacttaaaaaacttctgtagagcacaaaagtactgatactgacatattgtcagaattgtgctattttattattagttatgataatctattgttgtgcctaatttataaattaaactttattataggtatgtatatatagggaaaaacataatatatttagggttcagtgttatctgaggtttcaggcatccactggggatcttggaacatttcctcgtcaaatcagtggggactattgtaacttcttttttctttaagcattttttaattgtaaaatttgcaacacagaagagtgtctaaaacagattacagcttaatgaaaagtaataaaaagattacacatgtatcctgtgtcaggtagctgcaagaccatccttaggtttgatgatttattaggactcagcatgtagccatattcatagctataatatattaaagtgaaaggatgcaaagcaaaatcagcaaagggaaaagacacatggggtgaagtccagaagaaaccaggcacaagcttccgggaatcttctcccactggagtcacaggacatccttgattcctccatcaatgaatatgtgtggcaatatgtgtgaaatattgtctaccagggaaatttattagagacctggtgcccaggatttttactagaggctggttctgtaggtaccctgttttaacaggtttcaaatttcagactcccagaaggaaggcgggcattaagcataaaccacattgtacaaacagtttaagcacaatgagccactctttattggttctaggggtggtgagaactttcctgaaattcaacttctagacaccagccaaaggctgaccttgcaagtaagccttctgagggtagcaggctcagaccggcttgtgttcacttttttctgcacatacccatttccacatgaagaaatagagcattaccgtagctttggagccccgtgtgtgcttatcccccatcacatttttctccctaccccatatatataaccattgtcctcacttttgtgttaattatgccgttgattttctttatagttttataacttcttcatgtaactctaaacaaaatattacttctttaaagaaaaaactgaatagcagacacaagcctagcctagttgtgtaaagactgggcaatgttgctcctatttaatgaatgctttaatgcaaagataagctgaatggtatctctgagatgttctggcttcagagtttgcaggaccttttctgggaaaactggtgggaatggtcatgagcaactttgggaagtaaaagcctcatcatgtcagggtatctggcagcattgtagtgtggatccaatgtggatatcctacagaaatatgtcaaggaatggagctgcttccaaggaaaccatagccagttctaaaaagtaggtcaaagtagaacacttctatggcatgaagtgcaagtcctcaactaatctttgcattagcacgtggaaagaaaagaaggaactttatcagctcatggccaagacaaggacaggtcaaattgaggccaaactccccagggcatctttttctttgtttaaaaagaagcttcaatggcagcaggtatcttgatgatgaagtcagtcttcctggatcatgttgctctcatttgttctagttgccctctatacctttaatatggcactcaagtatcttcattcaccatcatcttaggttttcccttcacccttctcttacattggactacctgtttcttcttgtaaaaagagcactaaacgaaatcagaaagtctggcttcgagtcttgagccaagatttagcagatttgtgaccataagcaattcaccaaacttctctgattttcccattttttcaaataaaggaagacatttcatctgtttcatatagttgttagatccagttgagataatatatgcaaacagctttataatcctaaattctataaaatattttttattaagataaaaattgactttaaagtcttagatataagggactatcagcaggagctgatgtctgttaggataaaatgatgaactcccacatgtttttctgccagacttgtccttgatgctttaatgctaggaattgcctagaattttaaggaaagagagaggtgggggaggagcggtcagagtggattgctcttgatgcaggagtcccagatgacagccgatgggcctaattcggctattcaagctaagaatggtttgtgcatttttaagtagttatatataaatatataattttgatttttcttcttggcccacaaaacctaaaatatttactaactggcctgtattagtctgttttcacactgccataaagaatactacctgagactgagcaatttataaagaaaggaggattaattgactcacagttccacatggctgtggaggcctctggaaacttacaatcatggcagaaggtgaaggggaagcgggcaccttcttcacaaggcagcagaaggagagagaggaatatgtggaggagagactgtcaaacacttaacaaaaccatcagatctcgtgagaactatcatgagaacagcatgggggaactacccccgtgatccagtcacctcccaccaggtccatccttcaacacgtggggattgtggggattgtaattcaagatgagatttgggtggggacacagagccaaagcatatcatggccctttacagaaaaagtttgtcaagcttgtttagggaaggtactatatcatgaactttattggctatgtatatgcatgctcaagagagggagagaggggagtggggaaaagacctatgatacacaaatatgtcttactatgtgttgttttctaaagttgggaagtcactgtggactagattacctttgtcaccttttcagttttaatgattgtgtcatttattaatattgtctttttctttgtagaatgaattaccagatggattaaacaaaaagcgtttacaaatcttattaaaaggctatggtgaatatccaacaaaatacaggtacaatttaaattctgtatgttacatcagttttactcaaaaaaaattggggggattaaaatatatttttatttcagaatgttcatttggcgctctctgctacaactgcctgaaaatcatactgcgtttagtaccctcatagataaggggactcatgtggcatttctcaaccttcagaagaaataccccatcaaaagtaggaagctactcagagtattacagaggtatgttctatatattgcagcaatgtgtatgagacctgtaactaataattgcaatgttataaaatctcctgtttataaaatattgttttgtcagtttgattatccttatgtgatatgttggtttaattttaaaaatgtacatgcacatatattacatgtgaatattagtttgtgttgtgttctagaaaataggactctttcagttaatctgaaagaacatcccagcactttgggaggccaaggcgggcagatcagctgaggtcaggaattggcgaccagcctggccatcatggtgaaacctatctctactaaaaatacaaaaattagctgggtgtggtggcgggcatctataatcccagctactcaggaggctgaggcagggagaatcggttgaaccctggaggcagaggttgcagtgagctgagatcacgccattttactccagcctgggcgacagggcaagactccatctcagaaaaaaagaacagaggcatagtggaaagagctttgaatttgaaggcaaaagacctagttttgaattcttattctaccacttaatgattgtgatgtaagacgtgttattttacttcttagccttaattttttttatctaaaagtgggggtaataacaccaacatcataagactattgggaaagttagatgagaatctcttttagaatgcatatgctagagtccattcctaggaagcatccagtaaatgttaataataacagtagctcatcctttaacctgcttttcatgtgttaggcacatttgacttataggtaaagaaactaaggcatagagagactaggaaatatgatcaagtcacagcagtgatagagctaagattaagcccaggttccagagccgaagactttttttaaaaataatttttattatgaaaaatttcaagcataaataaaaaataatgtaacaaatatccccatgcccatcacccagcttcaacaattgccaactcatagccaatcacgttgggtgaatattcccactcactctacaccccacatcccaacatacacacactccccttgctaaatatatacatatgtatccctaaaggataaggactctttttctttaacataagtacactatcatactgacacacaaaaaagaattaataattcttcagtatgttcaaatattcaatcagcattcctctgattgtcttaaaaattttcttatgtaaacttgttcaaatcagggttcaaacaacatgtacacattacatttggttgataccccactgagattaatctatagactctgatacctctttttttcttacaatttatttgttggagaaaccagatcgtttaacccatacagccctctatgttctgggttttgctgattttatttcatagtattgtttaacatgtttctctatctcctgaatttactataaactggcagttagagctaggggcttgatctgagtcaaggttttttttttcccccctttggtatttgtttctttcacttgcaagaaaacttcctaggtggttttatgtacttgttaggcggattataattaatacctggctgtctctcttttcgtgatgttgtccattgatgattattgcctacatccattatttcaccagagattagcaaaacagtgataatataattctgttccttctcattttataaaccgggaaatttctccaaagaaaaagttcttaggatcaactacttggttaccggaagatacaacccatgtaggaaaaggcaagttaaatgcttggtatctttttttttaaacagttttcagaatagtaaacttattaccttggagctccccagagcaatcagtgtattgattatgaactcagattgaacatatagaccttttcagtacatagaaccaggagttcatactaatattttcaattcagatttaagattacaaatttgcatagctgctttgattttatatttgtatttttttcttatgctaaaaatcttgatttctaacagcattgacataattccttattttctttaacacacatacacacacacacactcacacaatggtttttaagctccatatatttatgctgtataataaaaactatataactataaataataacaatgtgaatattatgattattgaaagcagtccaaaatatcttttatagttctttttgtccttaggttatatcccactaggcatatataatcaaattattgttttcatttttgtttttgttttttgagacagggccttgctctgtcacccaggctggagtacaatggcataatcatagctaactgtaacctcgaactcctgggctcaaacgatcctccccccttagcctcccaagtagctgctacaggtatgcaccgccatgcctggctagtttatttatttatttttaagtagagatgaagtcttactatgtggcccaggctcatctggatctcctgggctcaagtgatccttctgcctctaccaccaatgtattggtattaatgtattggtattacaggtgtgagccaccacacccagcccaaattattgttttaaaatgacttgaaataactcctcttcatatgataatgccactagctcactacacaggttaatttgtttcatttgttttcagttttttgaaaaatttttgtatttaatttaatttgttttatacttttataaaacatttacatgttttctaaatcaaatctacaaaataaggtacattcagaacaggctgacttctgtttcctttgtcctgttacttctcctcccaataagtcatccttttagcaaatatcttatttgtatttacaaatatgtttgtatttacctccttaggtaaatggttgtatactattacacttttctgtactctgctttttaaatttaacaacgtattttggatatcattttaaagcaatgtacagaaatattcatcttttttttatacctgcattatgcaccattatttatttggcctgtcccttaatgaacatgtagattattttcaatcttctgctgtcacaagcatgctgcattaattagtttggcccataagtctttttctattaagtgtatctttggaatagattcataaatgttagatgctgagtcaaagggtaaatacataatatactgcccttttcaattagagaaaacatcagataactttgttaagagatgacttagagatgggaatttgcttactttttctatttggtcttcacacttactatgcttcctgtctgtgtgtaagataacatcacagttcagacgtttgtcagaataccagtgtagactgtcagtgccttgcctttgctttttaggttcatattctaggttgagagccgtaaatatcttgggtagagagtgaagtctctcatcagatgccgaaggaattaaaagaggagagtacattacttcaaaaatgatgattttgtgcattcttctgaaataataaatttcctgagttcagaggacaaggtagaaaacattttctccttctgttgaccccctcactgtagggaatgaagaactgattttatcaataagtaaaagttactcaagtaactgtttaaggtatctaaaatttcttataatttttccgtatcctaggattttagactttctaaattatgaatgcttttcttgggtacttgttgatgcttcttccttatccccagtagtacaacttaaaaacagaatattttaggattttttcactctttcattaagttctgttcacattcacattaagagcaaataatactgctctgctttttgggaaagagtgaggtaacacttttaatatcatagtgtaagctataaatttgattaaaaattcaaattatcagagaaataattttgatgttttctacctaaatacagtgtatacatggggaccttcttgagatgtattttccaaaagatcttcctaaagtgacaagaggttgctcatatcatttgaagtttctcataaaatgtaataagctgttacgctttatatacttatatgcctactagtacatttacaattaaagttaccattgtaactaattctgtgtaggtgtactttaaattataatcctagtttagttaaagcttcaaagcaattttttttgttggttctgaaatttctgtttttctaaatttttaaatttaaattttacatttctgtttctactaaaattcaaaattgtaacttaaaagggagggattattctacattaaaagagatagagatttaagggcgataaccaaattcaatgagtgagccttttttttctgctacaaaaatggatcaatgaatgagtcttgtttagacaattggggaaatttgagtcttgcctgattatgaaacaatactacaaaataattgttaattttatttacgttacagtggtgttgtgactatataagaaaatcatccctcccccacttttttaaagagttgtagacttctgtattaaaagaataaagtggcatgatgtctgggatttgctttataatagtctagccaaaaattgaggggatatagtcaatgaaagaagtataataaaacatggatttattgttgtagccaggcgacaggctcatggggcatgatcgtgctttctagttttatatatgtttggaattttttgtgatacagttttttgttgttgttttctgtttgtttgttttttgttgttgttgttgttgttgagacagagtttccactctgctgcccaggctgaagtgcagtggtgccatcttggctcactgtaacctgcccctcccaggttcaggtgattgtcctgcttcagcctccagagtagctgggactacaggcaccccccaccacacctggctaattatttgtgtttttaatagagacagggtttcaccaagtttgccaggctggtctggaattcctgacctcaggtgatctgctcgcctcggcctcccaaagtgctggcattacaggtgtgagtcactgcacccggcctgtgatacagtatttttaaaagtaactttaaagtattcattttcaatgacaaaaagaatattccttctttgtaaaataattcaaacagtacagaagattatgaagaaaaaatcagcacctcttccagccccaatttgacttgctagaggtaattgtttggtttacttttgtatagatatttttgtatgtatataatgcaaaagtattcacatacatttaacaagaatggaatcatactatacatactattttgccgcttatcttcctttttactttcaagtctatcatggacctctttctctcagtatatgtaggtttacttctttctaaaaaatgcacatggatggatgtttcaggatttaagtcttcatcttgttaattgacatttaggttattttatgtttatttgcttttcagacaatattataataaataccctcataaatatcttgtgtgaatatttttgtgtagacttctagaattgaaactactaggtcaaatcattcattttttctttctctctcagaaaattctgccaaccctgggaaatgccagtgttactgtgttttcaccgacactggatgttatcagtctttatttgttgtcagtctgagagtcagtcaaaagatggcaactcagcattgaatatgtaacttctgtaattatgaaagtactatccttaggagaatatgttcttgtatttaggttgatttctagcccttccaaaaatgaggatttccttacattctctggaattccatgtcctaggctcagtaatgaagctaatccctccctcctggggttgttctgagtattgtatcgaataataaaaaatgtctgacatagcttattaactccattaactatgttagttctctattgctgctataacaaattaccacacatgtagtggcttaaaaacaacacaaatttatccttagagtttggtaggcagaagttcaccatgggttggatctcactgggctaaaatcagagtgtcagcagggccacattcctttctagaggctctggggagaatccttttctttgccttttccagcttctgcaggtttcccatatttcatgactcagacccaccttttctgtcttcaaagcacctctctaaccattcctctgtagtcgtatctccctctgaccgcaaccaggaaggggttctttgatattaaggacctatgtgattagattggacctacccaggtagtccaggattaatgccctcaccccaaggtgcttaacttaatcatatctgcaaaatctcatgtaaaataatatcttcatggattacagggattagagcatggacatcttttggggagggggacagttttcattattctgcttgccacattaactataaagtatactcagaaaaataatttatatttaaacagtaatgaaagggaattagccttaaaaatattaaaagctattataaagcattgaaattgctgctgacatataaatagatatgcagagtctaacaatagacccagctacattccaaaattgacttgtttttaaagatgtcatttcaaagtaatgaagaaaagataggttatttagtaaatgacatggaataactagctagccatctagaaaaagttgaaagcatacctcatatcttacaccatataaattctgcttgaactaaagatttaattcctttttaaaaaaacaaaaccatcaaagtattagaaataaatgtggagttagcaagtctgaaactactttatgtgtagaagccactttttgtatacaaatagctcaatagagacgagagccaggtttcttactctcagagaaagaagataaataagcaaaagggctagaatgaatcttgcagtagttgattggaatcgatagtgttagttcttaacgtatatgcagataaatagacacagaaaggaatatagatatgcatgtatgcaggagttagtatacatgcatatattgccaagctctttctaccgagaaggcctaacaatgacaccctggtaacagtgagcgcacctactggtgtggggaaaatacaagatgaacctgaagcatcttttagtgccataaagtaaggaaatgctctgaaaggatgggcatgtcacaagggcacgtgactcaacctaaaagtttccagtggccaaagctggaacaatttgaggaacaaaataaataacaatcaattataacttgtagaataaaataaatatccatgagttcatcctgacataaataattgaataaataaagatataaatgagggagaagggacagttctaataaatatagaaggaattagagatatagaaaatcactattgggacaccacggtgataattgttggaggcaagatccaccaattgatgctaaaattactggacaaaagttctaggagtgcctgggcacggtggctcacgcctgcaatcccagcactttgggaggtcaagacgggtggatcacctgaggtcagaagttagagaccagcctggccaacatggtgaaaccgtatctctattaaaaatgcaaaaattcgctgggcatggtggcatgcacctgtaatcccagctacttgggaggctgaggcaggaaaatcgcttgaacctgggaggtagaggctgcaatgagcccagatcacaccactgcactccgcctgggtgaaagagtgagactttgtctccaaaaaaaaaaaattctaggattcacaggatatttgcatagtcttaaaatatctcccccaagacagttattaatggcaaatggaaaaatagtaattttgtagtagataaactcagcagataacagcttaaccaagtaagcacatttaaaatcactagtacaccaggcgtggtggctcacgcctgtaatcccagcactttgggaggccgagacgggcggatgacgaggtcaggagatcgagaccatcctggctgacacggtgaaaccccgtctctactaaaaatacaaaaattagccgggcatggtggcgcgcgcctgtagtcccagctactcgggaggctgaggcaggagaatggcgtgaacccgggaggcggaggttgcagtgagtcgagatcgcgccactgcgctccagcctgggcgacagagcgaaactccgtctcaaaaaaaaaaaaaaaaaaaaaaaaaaaattaattgagcgtggtggcacacacctatagtcctagctacttgtggctgaaatggaagaattccttgagtgtggagattcaaggctgcagtgagccatgatagcaccactacactccagcctgggcaacagtgtgcaaacctgtctcaaaaattaaataaataaaatgactggtaataagatgtcaatatgatgcacatcacttttgtgatattctttccaaaaatatgtaacctcattctaatcataagtatcagacaaacccaaattgaggaacaatctagaaaataactgatattcctcaaaaatggcatcatcatgaaaaataaggaaagactaaggaactctcatattggaagaaactagagagacaaaacacatgtaatgttgaatctggggttggtgaaatgaaagaaataacggaaaaatgatatcagtggaaaaacggtaaaatctgagtaaagtccataatttagtgaatagcatgtgccagtgttaatttcttagtactgatcattgtactatttgcaagctgttaacattaggggaatttaggtcaaaggtatacaataactctactatttttgcagttttttttgtaaatctaaaactatttcaaaacagaaagttaaaaaaaggaaattaacagtacaggtattagaagtacatgtgggagaattataatcccagaggtaatgaaggcctttctgagtatgacatatccagaagaggttgataagaataaaaatctctacatgtaaaaataatttccaaaacaaagactcatgtaaaactgaaaaaacatatgcaaaacctgacaaatgaaacgctggtttctttaatgtatgaagcgcttatataaataaacatgtaaaggaccagccagtaaaaaaaaaaaatggataaacaatgtaatatacagtttacagtggtaaaatggttctttctatttattttagttttttgttttagagacaggatcttgctctgtcacccaggttggagtgcagtggtgtgactatagttcactgcagccacaaactcctggacctaggcaatcctcttgcctcagtctcctgagtagtaggcgtgtgccaccacacctggctaatttttaaaaattttttgtagagatgaggtctcgctctgttgtccaggctggtctcaaactcctgggcttaagcagtcctcctgcctcaaccccccaaaatgttgggattacatgcatgagtcactgtgcccagcctagaaatggttcttaaacatgaaaagatgcttaatctttctcatagaaagagtaatgccaattggaactacgttgaagtaccatttctcacctagattaaaggttttttaaaaatcattgataatatgcggccaagagtatgaaaaacaggcatccctttacgcgagtcataggaacgtaaatagacactttttgtgggggctaatttggcactgactttcgaaattgcaaatgcacgtattcttgactcagcaattccactttaggaatttccaagtctgtattctcatgtgaagaatgatacacactgtgtggcacatacagtggcattaagcacagcattgcttataaaagactgaaagcaaatgccctacgatagagatcatgttaaagaaatgaaggtggctgggcacagtggctcacgcctctaatcccagcactttgggaagctgaggcgggaagatcgcttgagcccaggagtttgagaccagcctgggtaatatagtgagaccctgtctctacccgcaagaaagattagccaggcatagtggcatacatacacctgtaggcccagctactcaggagactgaggcaggaggaccacttgagcctaggagtttaaggctgcagtgagccatgattatgccactgcattccagtctgggtgacagagcaaggccctgtttcgggaaaacaaaagaaaaaaaagaaatgaaggtgtatcggtacgaagctatcatatccatctgtaaaatgtaaggaagttctgcatatactgatataaactatttccaagataccattaattgaaaaatgcaaagtacagaacaatttttataatatactaccatttgtggttttttaagaaaggatttatacttttaacaatggttacttctggagaggtgaactagatgataggggtacaaggaagaattttcaccaaatatactttttgtatcaaatttttatcatgtgaagatattatttattcaaataaattttaatgctaagttattttattcacagaaccttatctgcattagctcactggtctgtcatttttagtgacacaccatatcttccactcttggcatttccatttgtaaaattattccagaacaaccaactcatctgttttgaagttattgctactctcataagtaagtaaatacttgttaaagtataagatcaagaatggattcttatacattttcctgatgtctttgcacctttgcaacatttaacaattctagatgtctctacttttaagtcacgaaagtgtgaaacaataaggtatcaaacataaaatagacaattgaagcatttatatgtaaacctttttatttagaagaaaatctggaggccgggcacggtggctcatgcctgtaatcccagcactttgggaggctgaggcaggcggatcacctgaggtcaggagttcgagaccagcctggccaacgtggtgaaaccctgtctctactaaaaatacaaaaattagccgggtgtggtggtgcatgcctataatcccagctactcaggaggctgtggcaggagaatcacttgaacccaggaggtggaggctgcagtgagctgagattgctctacagcactccagcctgggcaagacagagcaagaccccgtctcaaaaataaaaataaaataataataataatttattgtctgcataatatagtatttcatcttatgaatatatcatttatatattccccaagtgcaagaattttatttttctaatttttccacacttttaaagcagttttttgttgttatactacttttacttcatgttatatatatttcccttatttttataaattaaatttcataaacattttttattggctattattacataatgtgcatgtactagtttaatcttcttggatatttagattgttcctaattttaacctcttttttttttttttttgagacgggagtctcactgtgtcacctaggctggagtgcagtagtgctcactgcaacctccacctcctgagttcatgtaattctcctgcctcagcctcccaagtagctgggattacaggcacccgccacaccatgcccagctaatttttgtattgttttagtagagacagagtttcaccacattggccaggctggtctcgaactcctgaccccaagtgatccgcccacctcggcctcccaaagtgctgggattacagacgtgagcccctggcacccgacattttatctattaaaagtaacaatgttgtaactatcttcgcatgcaaacataatagttccctttgcgtagatttccagaattggtgttatcgggtcataaaatgtgaataattgattccccaaaagggttgtcatatggtttggatgtgtgtcctctccaaatgtcgtgttgaaatgtgatccctgatgttggaggtggggcctagtgggaggtattggaccatgagggtgaatcattcataaatggcttagtgccattcccttggttgtaagcgagttctcgctcagttagttcacacgagatctagttgtttaaaagagtgtggcaccacctgccctgtgctctcgttcctgccctcttccagaggccctcacctcatctgtcgctcctgctctcttcacttcctgaagcaggtgctggagccctgcttgcacagcctgcagagccatgaatcaattcaacccttttctttataaattagccagtctcaggtatttctttatagcaatagaaaatcaaactaatacaagtattagtttacctgccaatagcactaccgtgttttaaaagcaaaagaaacacaataacaaaaagacaaacaagccaattaaaaaatgagtaaaggacttgaatagacatttctccataggcagtatacaaatgaccatcaagcatatgaaaagatgctcagcatcattagtcattagggaaatgcaaaccaaaaccacagtgagatgccacttcatacctactaggacagctgtaatttaacaatgttatatacatgttaatgaggatgtgggaaaattgggaccttcatttattgctggtagacatgtaaaatggtgcagtcactatgaaaaaacaatttgccatttcttcaaaattccaaacatagaattaccgtataacccaaccatttcactcctgggtatatacccaaaagaattgaaaactgagacttagacagatacccacgtgtgaatgttcatagcatcattattcccaatagccaaaagatggaaacaatctattaacagattaatgggtaagcaaagtgtggtaaatacacgcaatggaatgttatccagctgtcaaaagcaatgaggtcctgccacatgctagctactacacgggtgaaccttgagaacatcctgcttagtgaaatacactagatacaaaaggacagttattgtatgatttcacttaggaaatatctagaataggtaaattcatagacacagaaaataaattagaggttacaggggctagggaaagtgggacagagagctagtcctgaatggatacagagtttctatttggggtattgaaaggatttggggaatagatagtataaccctgaatgggatcattgtataaccctgaatgggattaatacctctgaattgtatatttaaaaatggttaaagtggcaaataacatctattttactataattaataaagaaatggattgtagttaatttaggtatgtatgccaaactaaattttttatttctggtaaaatcttgttacatagctaaaatgttttataccaaggaaattgatttttctcttctaaacaaacatgcctgaaatctaaatttgggagattattgtttcctcttggatggtcagcatgagtggtggatttttatcaagggtctcaaagtagttttactcaataaacatttattaaagagtaacatttcagaggggagcaagtgaggaggctgcgtctgactcctgctttcacggccattgcagtacctggagctccacttgcacagatgcaagcccagtggacactgggtgactctacccttgctgaggaaaaagaactaaacactggcaaggcaattccaagaagctgagaggcagaatgtcatcacatgcgttctttgtgcagatttgccaggagaagcataagaagcacccagatactccagtcaccttctcagagttttctaagaagggcttcagagaaatggcaggccacgtctgctaaagggaagggaaaagttgaagacatggcaaaggcagattaagtttcatcatgaaagaaatgaaaacctacacccctcctaaaggggaaacaaagaagttcgaggatcccaatgcatctcacaagaggcctcctttggcctttttcttgttctgttcttaatattgccttgaaatcaaaggagaacattcagcctatccattggtgatgctgcaaagaaactgggagagacgtggagcaacaccactgcagatgacaaacagccttttgacaagaagtatgcaaagccaaagaaaaaatgtaaaaaggatattgctgcataccaacctaaaggaaagcctgatacagcaaaaatgagaaccatcaaggctgaaaaaagcaagaaaaaggaggaggatgaggaagatcaagaagacaatgaataagttggttctggcacagaattttcttcttgtctatagagcacttaacagtcctgtacacactcacttcttttaaagaaaaaatttgaaatgtaaggctccagaacatttgtttaaactgtacagtgtctttttttgtatagttaacaccctatcgaatgtctttggatagtcttgtcctggtgatattttcaataggattaacttcgcttggtacactatggggattataaattggcatggaaatttaaaagcaagtttttgttaatccacagcacaaattagttattttgaatggggatagtagtttttcatcttcagttttctctaatgtagcttatacaaaataaatgttttgttaactgaataccactccataattgaaaaaaaaaaaaaaaagttgcaactgttttgttgacattctgaatgcttctaagtaagcacaattttaaaaaatttactgaacttcagctaagcactagcactgctgggatatgccatcgttttggcttttaggtttgtagtctagttgggacttagaagacattttgaaggaaaagtcacatctacatataatttggaacgtatttgtaaaagtcttttttagacactagagtctcttttatgaccagacataaagtcttttggtttaacaaagactctccacacaattatcatttctctgtattttgctatctgtcagttctctctctaggtcctctacccatgcttttgtggtggcatcaaagcagaataaaaatacttaagagcaggcagacggttactgtatgcagtaggatatcctcttgctaaggaaaaacagcgctctcttaatgaagattgtaaggatcaggcctttgggtatatgtgtggtgttttaagttctcagaactaccagtgtcagagacataacaagtactcaggtgctgaaccatatttttccacttaaaattaagagctgggctgggcgcagcggctcacacctgtaatcccagcacttgggatggccaaggtgggtggatcaactgaggtcaggggttcgagaccaaactggccaacatagtgaaaccctgtctctactgaaaatacaaaaaaaaaaaaaatgagctgggcatggtggtaggtgcctctaatcccagctaattgggaggctgagacaagataatcacttgaacccgggaggcagaggttgcaatgagccgagatcgcgccactgcactccagcctgggccacagagtgagactccgtctcacaaaaaaaaaaaaaaaaaattaagagctacagagaatttgaaatattttttaaagctcagtctttgcaagattttatttctgacttcattattaactcaaatttaaataatcaataataagtgaaataatggaactccagaattggaaagttcttataaaccactgtaatctaatattctgctgataaagccttcttttgctattttgagataggagatcttattatcaaaggatgaatctacaactcaatatttaaaattaaaaaaattttaaaattaagttaaacatagtcttattgaacaaaacaaaccgatggtcttatatacggctttgagaacaatctgtgggtcgttctactgattacagagtgcaagtgagtcaaagtcagccttagagttagttgaatatattctactttggactaactgactttcaaagaatgccactgttaccgattggttggttttcaagtcaagtttactgaaacaagttgtcaatgatcagttagatataaaaccagtcctggtggctattcctggttattccttattaccatgcttatagaacaatcagtcttttcctcagaatgaggacatttttattgtcattataatgtttaagggattagggatacagtatatacacatttgtttttatatattgctgatgtaattttgaacattttccttaagttttctaattttgattacatgtgaattttagtagatttgaggagattggcatgctaatgttgattacatttaatgaagggttaaataggggccctttttaaaaagatcatttcgttaatcaggtgatgaacaaagcaggagtcaggagccagaatgccatcaggagtactttgggaagttgtgattgtttgttttaattaacactttttcattgactactgtaaggaaatttgcaaaatttctgtaaacatactatgttaacatgataggattttaaaatcgattgtcatacaatataaagagtttttttttattattcatggacatattgagaacataaagattggatacatttaagaattgcaaagagttttgataacatggaaagatatttaaagatatgttttcttttttttccttcatagtcaattggtgtcaacactggtttgaatattttcctaatcctcctatcaatattcttagcatgatagaaaatgttttggcatttcatgacaaggaactgctgcaacacttcatagatcatgatataacctcccaggtaagaagcataaggtttttagaataacatgccttattttgtaagctaacattggttctggtataaacagtcttttcttgaaggagtataataaaaagcatactacatgttgtatttttaacagtattccattctttttcttcattaaactgccttcctgaaagtctgtaaagaagggtccaaattaaggtagttattttcataattatgtatttaatatgattttcatagcttaaatcgaatgtaagggaatattaccaatgactccctttttacttttccctagaaaaataataaatttttccttatctgttttagctatatgcatggcctcttcttgaaactgtgttctcagaagtgctgacaagagaggagtggctgaaattgttcgataatatcttttccaaccatccttccttccttctgatgactgttgtagcctacaacatatgttctagaacgcctctgctcagctgtaatcttaaagatgactttgaggtaacggtccttgttcttaagagaaggttctcaaatatcagttatttctctctattttttttttaattttttgagacagagtctcgctatgttgcccaggctggagtgcaatggcgcgatctcagctcactgcaacctccgcctcccaagttcaagcgattctcctgcctcagcctcctgagtagctgggattacaggtgcgcaccatcatgcccagctaatttttgtatttttagtagagatggggtttcaccatgctgtcagggtggtctcaaactcctgacctcgtgatccacccacctcggcctcccaaagtgctgggattataggcgtgagccacagtgccaggccatatcagttatttcaattgaaaaatccatttatttattgagtccctgttatatgtcagacactggtgctaggtagtaggaatataaaggataacaagttagaccacatccctacctgtgtacagtttatagacaataaagtaggcaattatagcaggctagtagtcttataatcatagcttaagaaaagaatcatgataatattggggtttgtgctttttgcattttttttttttttttttttttttttggagacagagtctcgctctgttgcccaggctggagtgcaatggcacagtcccggttcactgcaacctctgcctcccgggttcaagagattctcctgcctcagcctcccgagtagctgggattacaggtgcccgccaccacgcccagctaagttttttatatttttaatagagacaggatttcactaggttacccaggctggtctcgaaccccttacctcagatgatccacctgcctcggcctcccaaagtgctgggattacaggcatgagccaccacgcccggctgcttcttgcttttataaaggatgtttaacaggttattctgttattctgtgcataatcttatcatgacccatctggtcttagagggtctgaatgcttattacacatgcaaaaggtaactatgagagttttgagacttggcaggaaagtgtctgaaagaaagcattaagatcattataaaaagtagacgctcttttggtagacaagatgaattagttgggttcttgtgtgtgtgtgtatgtgttacttatttagtggttactgtccaattaaactttatttttacttcatgatcctgtgatacattaatttggatcttccagcaaaacaagataatgtggaaactttttagatatttttaaagaagcaagctaatttattttcaaaggctaatttataatttattttggattttgaagaaaaaaaaaatccaagcagagtttgttccattgttgaagcattctttttctattgtaagaaaagccttcattttttaattttatgtcagaatttcttatgattgtgaaactcttacattttttaaataaattgtctttgttgtaaaacttgagtaaagaaaagctttaatgaatttgcaaaaaaatatatattcttaaagatagatacactttttttaaattcttgttttaattctacctcataattgctttgtcaggtaaatctcgatttaaacaccaagttttcttacagtttttttttcaccatcggaataacctggatataaatgttgtgattagacaagtttatcatctcatggagaccacgcctactgacattcatccagacagcatgcttaatgtttttgttgcactgacaaaagggcagtatccagtatttaatcaatatccaaagtttattgtggactatcaaacacaggaacgagaaagaataaggaatgatgaattggattacttaagagagaggtaattatggaatagtttttctttttctgatacaatgaaatatgttataaacataagaaagttttaatgaaaaatacatttggctgagcgcggtggctcacgcctatagtcccagcactttgggaggccaaggcaggtagatcacaaggtcaggagttcgagaccagcctggccaacatggtgaaaccccgtctctactaaagatacaaaaaattagccaggcatggtggcacgcccctgtagtcccagctactcaggaagctgaggcaggagaatcacttgaacccaggaggaggaggttgcagtgagcggagatcatgccattgcactccagcctgggcgacagagtgagacttcatctcaaaaaaaaaaaaatgcatttaaattatgagtatttgtgtaaaatcagagtttgaaggctagaaatattaaagatagttaattcttgcatatggaaataaaatagattatacattaatcggtatacattttgtgttttgatgattcttagctttcttctttgtgttttcataataatattacctacttaaggcagacagttgaagatatgcaagctaaagtcgaccagcaaagagttgaagatgaagcttggtaccagaaacaggagctgcttcgtaaagctgaagaaacaagaagagaaatgctcttacaagaggaggagaaaatgatacaacaaagacagaggtatgtgttatcactttaaaaaaaaatctggacatataagttagttgaataatttttatgttctttcattttttcattttagaaacaacattatatataggattacccagctgtagcatttctataaagcaactattaagttaataaaaagaatctttatataccacttttcaaaaaaaattgctatgtagtaaaatgtaattctgaagctatgctgaatataatatagctttgcatggattaatgttccttgaaggacattatttagaaacattattctatagtgggcagaaatgctttgtaatagaatgctaggtacatcacctttagtagagtataatttttttaattgtgttttaaacatacctgtgtgacctgacagttgtaacatagaatgattatgtcattacccatttaacactttggaggacaggggaatgagtattaaatgcgtattcaaaagtacgttagctgggtgtggtgccacatacctatagtcccagctactaggtaggatcacttgagcccaggaggtcaaggccagcctgggcaacatagtgagaccctgtctcttaaaaaataaaaagaaaaaacttaaaaataaatacataaaagtatgttaataaggtaaaatgtgtaaattaagtaaagtaatgggataaacattgagactaagcccaatagttgggaaactcacttctgtgtttattgattcctattcttagatggaactttatgtaacagatttatagtgtgggttaaaaggaattactgaactgagccagtgagctttctactaaaattcttaaagcataagtatacatcatctttggtaacggtggagcagttctcgcattcttctttcaaataaaggatatcaattgtattgaaatgatcagcatggcagacctgttatgaaaaaactaaatcatattaggaattgctgtatttgttccacttgatgtattttgtatttaaggctagctgctgtgaaaagagagctgaaagtaaaggaaatgcacttacaagatgctgcaagaaggcgttttctgaagcttcagcaagatcaacaggaaatggaactaagaagactggatgatgaaattgggagaaaggtttattattcttaacttagttctcatacatcatctccatttactctcacttaaatgtaatgaacaccttcaaattaaataatattcttagagtccaccatgaatactaaatagccgctttaattttatttacttttcccctcagctttctcattctcttttgtatttcatgaatggctaaatatttaagaaatgccaggaaaattagtcaagtgtccttggtgactatttctctaaaactagaaatatcagtatcagttagccattaagttattttttcttttcttttcttttttttttttttttgagacagagtcttgctctgttgcccaggctggagtgcagtggcgtgacctcagctcagtgcaacctccgcctcccgggttcaagtgattctcctgcctcagcctcccaagtagctgggattacaggtgcacgccaccacacccagctaatttttgtatttttcttagagacgggatttcatcatgttggctaggctgatctcaaactcgtgacctcaggtgatctgcccaccttggcctcccaaagtgctggggttacaggcgtgagccaccaagcccggcagttaatttttaattaggggacatattcttttttcatataaaaattatctgtggccagtataaaaataatttccagtacaaaacatacagaattaaaaattgaccttctccattagttctcatgtcatccccagagaaacactattaaaaaatggttaattggctgggtgcggtggctcatgcccgtaatcccagcactttgggaggccgaggcaggcagatcacctgaggtcaggagttcggaaccagcctggccaacatggtgaaaccctgtctctactaaaaatacaagaattagctgggcatggtggcaggcgcttgtaatcccagctacgcaggaggctgaggcaggagaattgcttgaccctgggaggtggatgctgcagtgagccgagatcatgccactgcactccagcctgagcgacagagtgagactcagtctcaaaaaaaaaaaaaaaaaaaaaaaggttaattacatagactttcaggtatgttctatagatagaggagtaattatagtcatgttttcctatatttatacaaaaatgggattattctcattatacattgtttttgtaacctgctttttaaaatttcatatgctgaatatcttttcatatttgttatatgtgtatctatttctctttttgtggttgtataatattccattgaattaatagcttatttaatcctttgctattggacatttcggttatttgcagtgttttgcaaattacaaaaccatgctacattgtaaaagtctttgagtacttgcacacatacttttgttgagtaacttctaaattatgacaaattgttctctaaaaatgaaacagtttcagctgttttaagtctgtaagagtacccactccctagtatagtcaattgtactgcatcagtcttaatatttgccaagcagatagatgacaaatcgtctattttaatttgcctttttttattgttagtgaggttaagtatcttttctgttacttatcttccatgtgtagaattacacattacatatttgtatcatttgtccatctttttgtcaagttagacttaactttctgtcaggttagcttacttatttccaaaaggcaagtcaattgtcccaacaccatttgttgactattatccaagtcatttgccaactgatggtttttacatattaaattctcttacatatttgatctccttcctcgctttttctattcctaagccagtaccacactgtttgaatgacagtagctttgaagtgttttaccaactaggcctagttctcactcattagtcttccttttcagagttttcctcagtattctcaaatgtttatcattccaagtagactctaagaattgtttcacttttggaattctcacctctcccaatcctattggaatttttattaggattacactgactttatgcactaatttagagtttcaagcctagttttgataaaatactaagtattttttaagtcttttttttttttttttttttttttttttgagacagggtctcattctgtcacctgggctggagtacagtggtgcgatcccggctcactgcaacctccacctcccggattcaagcaattctcatgcctcagcctcctgagcagatgggattacaggtgcctgccacaacacccatctaatttttgtatttttagtagagacagggtttcaccatgttggtcaggctgatcttcaactcctgacttcaagtggtctgcccaccttggcctcccaaagtgctgggattacaggcacctggcctaagtctttcaaagtatttttaattcaatagtattagaaatctatcatctctttatagcatgatacttcttgttttgtttaaagcttgttaattttaaattggttttcaaaatccaagatttcttttaattttctcatctagtgaatgacattgatatttcattactgtagaaaagtgtatgttcttcccgcaaagtaagctcagaactctgatgtctttattccaaacccctttgaaacaggaggaggcattttttggtccaagaattctatagactcctttcagcaacatgatctggcctccgcctacccttgcagcctcctgtcctcccagctacctgttctgatgttgtgctctgaccctgccaaactgcaaaagctcttctcatggttcagactctagcaggaaaggctgcttgaatctgaagtgacaagtacatgtgactgtgaacatctgttagcagcaagcaaagctgatcggtttttgctgtggcacatagctgtttgtatctctgaaaattcataagcaaaagagctctgtaattgaaattcctaaaaagcgtgatttgctaggccacacctctcctccacttcctggcattattactgttcttgcttcacacaatcaagcttcccccaacctttgagctagctcctttcccaataacctctttaaattgaactggtcctggtccatgtttctcttttagtctttggatatatatgtttgcacatccaactgtattctcatttagtgtttctcctattttaggtattcgatagcatgtcttttaccataatgacaatatctaacatttcactttatatctaagatcatttctaagagtctctagagagttccatatcccatatccaaagcctctagtatataggaataaaaagcctccaactaatcaaattttggaaataggtgaactctaaattaattcacttggagcagaacacatacaggttgaaccatctgcaagaaatttaaacctagaattgttaattgtcaaaccatacttataaaagtagagaagtttagtcaaaaagagcattaaataaatgttatatttttatctaccccagatttaaattgctcaagtttttctaactcatgatattggttactgtaatactgtaagaactgctatctgttcttccagtctgagtagatgggcatatggtattgtgctttttatttttaaattaaacttaactttaactgagagattattcctaggttctgcagtgaatattaatctttgtctgttactctggtttcaaaaacccagttgctgttattttaaatactgttagtaggtcgttcagattacaggattactaaatatattaaaaattattttgtaaattctttttggtatttacagtttgttgtttggccataggtatatatgagagatcgagaaattgctgccacagccagagacctagaaatgagacagctggaactcgaatcacaaaagagactttatgagaaggtataattcagttatttccaacataagaaaagcaggttttggccaggctcagtggctcaaacctgtaatcccagcactttgggaggatgaggtggaaggaggatcacttgagctaaggaattccagaccagacctgggcaatatagtgagaccccatctctactaaaagtttaaaatttagctggttatgcttacctgtagtcccaactactcaggaggctgaggcaggaagatcacttgagccctggagttcgaggctgcagtgaaccataatcacatcactgtactccagcctgggcaaacagagcgagaccctatctccaaaaaaaaaagaaggaaaaagaaaagcagggtttgtataagcccattttagactgtatttattcatggttttctagcgttcattttattcactttttaagcagaatatagtgccacacaggattgtaaggtagccaaaatgtctgaatgtacagtttgttgtaattatttaattcatgtttctgttagcagcttagtctagtgtctgaagcaccagatgtaggccccagattttgcctcaggattttttaccaacttactaaattttcctgtaattacgtaatagtgactacaaaattatctcaatacctcacaaggatcctgaaaggtaaatcagtcaggagctgtaaagtactttctttctttatttgtatttttatgtatttatttttgagacagtcttactcagttgcccaggctgcagtgcagtggcaccatctcagctcactacaaccttcacctcccctgctccagtgattctcccacgtcagcctccccagtagctgggactacagacgtgcgccaccaagcctatctaatttttgtgttttttgtagagatagggtttcaccttgttgcccaggctggtcccaaactcctgggctcaagcaatctgcacacctcggcctcccgaagtgctaggattacaggcatgagccaccacgcctggcctgtaaagtactttaaattggaatcttctggagttaactcagcaaatatctgcttagtacttactattcagttttcaagacactggaaaaaaggagctttgttaatataaatttttattatttaggaaaaatgttttgttactcatttagtgttgaaactgtaagttttcacttctttcagcccacttaaaaagtcagaccttttagcctgggcaacacagcaagaccccatctctactagaaatacaaagaaatagccaaatgtggtagtgcgcacctgtggtgccagctattcaggatgctgaggtgggaggatcacttgagcccgggggacggaggctgcagtgagccaagattgtgcacttcagcctgggtgacagagtgagaccctgtctcaaaaaaaaagtcatacttttagtttgaaattagtgataactgtgaattcacaacacataacatatatgtttgatatccacattaggtgagatttaaaccatatagcatccatttacacctataacacttttaaagtctccacactgaatttcttctagaacagagcaagggatttacagtttggctgagtctcccatgatttggaattagatgtaattcatttggactaagctaaactttactatattttctttgggggtggaggatagtggcaatcgaagggtataattttagaactaacagggaatttgcaagaaaaatactaaaaatttccagatatttgtctctcagatttttaaacactaacattctactaaatttgctttctcttcctctttttctttacctatgcacatatatacacacaaacatatacttgtttttctgaactgttacagacgtgatgctcctttacctctaaatacttcagtgtatatttcctaagactaaggaatcctcttatataaccaccgtacagttctcaaaatcagaaattaacataagatgatctgatatataaaccttattcagatttgatccattgtatccaaaatgtcctttagagcaaaagaaaatctgagatctcatccattgttttgttgttgtcactttagtctcctttaaaataagaaatgttcgtgactctgtctttgtattttatgacattgatattttttgaagcatgtaaaccagataatttgtagaatgtcccttaattagcatttggctgttgtttcttcatgagaagatttaagttacccataggagtgcataactttaatctgtggcattcctgcaacagaagttatgttttgagatggagtctcgctctctcacccaggctggagtacaatggcgcgatctcggctcactgcaacctctgcctcccgggttcaagaaattctcctgcctcagcctcccgagtagctgggattacaggtgcccaccaccgcacctggctaatttttgtatttttaatagagatggggtttcaccatattggccagcctggtttcaaactcctgacctcaggtaatccgcccgcctcggcctcccaaaagctgggattacaggtgtgagtgactgctcccagcctatgctgagttttttttctgtgtatcagaatgggaggcaaatgtttgttaatctctttttgctgtcttttgaaggaattatttatttaaacaaaccaataggattagagaagagttaaactattcatcaaaacaaatatatgaaatcctgaactttatctggtcagttaggtacggatgtgctgccactacctttttcaaattggctgtagtgattgccactttacctgcccaatttatctcttacattaggttgattaaatgtgtctatttctaaagaaattatgtcccagaaaaccaacaatattatgattacctccacatgagctcaacattccatacgtatctaatttgaatcaaattattgttcaacaaaagaatgaaactaagtataaactaaaagaaacaagtaaatactaacctgtactccagatcccatcccctcataatcttctaggacctcatttatcaagtctgttttctatctgtctttcacatgtatgtaccttctccttcggataataccagtcttgcaaagattgctataaagattaaatgagttaatacgtatttgtctgtgtcaggggtccccaagaccaccctcaggttcagtgattcactaggactcacagaactccagaaaagctcttatattcatggttacattttattatagtagaggaatacagattaaaatcagtaaaggtaaaaggcacatggagtggagtccaggagagaccaggcagaagcttctagttgtcctctcccagtggagttgtacagacagcatttaatttcctgcaaagatgtgcgacagtatgtaagactattgcctaccaggcaagctcactcaagccttggtatccagggttttactgggggtcatgtagacatggagtgcatatgtggctgactttagttactttctctacaacccatccaaaggtcaaactgacagagcatggcccatggttcccaccagatcccatcatttagcagaaaccagctggcatggccaatatctccaggtatacagacactcttatcaggcagagtattccaggggcttagagattatctcccaggaactgatcaagggccagtcttttctttagaatgtgcaggtttttaattactcaggcctactgagttaaccctttattgcacagtgtctgatgtatgatacatattggatagatactagtttccctcttttccctttggcctaaaaagctctattattttaaaaagctaatggacaactccagtatgcacacgtcgtccaatatgtttcttcataccactacccaatctttgatcctcttcaccatttttagagttccattgtttcctcttagtccttaatctctacacatacatgattttacttctttatggagtagctaaaattctatgttctgcttgtcttcttcgcttaataaaattctttttaaaattctttttctaaatggctacatatttttgtaactgtcattggtagtggctgctggtgaaccataacttatttaagctttcttctgttgttagatgtttaagtggtttacaatttttgataataagcatcttcacatatatatctttttgcatataattgaaagatatttttatttttagcaaattataaggtaattatgctgtctatagatgattagaaaagtagaaaaaatccctcgagaaataacaactgctaatgtcattaatagtgatatgagattatttggtacatacaatttgtgtttggcttttttaacctacattttcatgaaggctgtttactatccttctcccaactactgtacctgttagcatttactctcctatatccctgcccctggcagccacgaagctactttctgtgcccatggatttgcctattctggatatttcatataaatggaatcatacaatgtgtgattttttatgactggcttctttcacttagcatgttaagcatcttttcatatgtttattggccattttgtattttctttggagatagtgtgattaatgtttacttaaagtatgtatgggtcatatttcttgttttgttttgtttttgagacagagtcccactctgtcacccaggctggagtgcagtggcgtgatctcagctcactgcaacttctgcctcccgggctcctgcaatcttcctgcctcagcctcccaagtagctgggactacaggcgcacaccatcacaccctgctaatttttgtagtttttatagagagggttttactatgttgctcatgctggtttcaaactcctgggctcaagcagtcctcccaccttggcctcccaaagtgctgggattatacgtataagccactatgcctggcacatatttcttgttttttttttttttcaaacagtcatgtgattttttgttgaaaactagacattttaaatacaatgctcctcaacttatgatggggttatgtcctgataacttatagaaatattgtaagttgaaaattcatgtaacaccctgatagacccatcataaaatcaaaaaatcattacgtcaactcaaagaccgtctggaatataatgtagcaattttggaaataagattgtctcccctccccagggtttcttcttgtttctttgcttagtgacttttctgaactaattttgaaagtccctattctttgttgtatataaccactgatgtctctactcaggtagtttgggggtcagcaaatgattgaacagagattttaatatattctttgaaccagtaagcttctagtagttgttgaggggctctgtgtgcatgttagggcacgcctttatcactcagctaggcagtttatactttctagattccgcttcctggttatgcaaaacctcagagttgaccagaagtgtgagatcttaggtctttctgtggtctgagaacacagcccgtagcatatacacagccttacacatgcacatgaccttccaggaacctatcagcttttttaagcctcctgtggacatctgattctccagtttttcctgttaagctttttacttagcctattggttgctcttctaagatctactgccccaagtagccaagatactcaacagtttgctctaattgttttcagcaacttccccagggataaggctattctgcactaggtgagctctgagtgagatcaaaaaagacagccttaggagtggtctttcagggaccaccagacaggtcaaacagtgacagttctccagcaatggtggtttgaaggatctccgtccaacccccttttgcttggcttccttccttggcttccaggctgctggttttcaagactaatgtataggctggacatggtggctcacacctgtaatcctagcattttgggaggccgaggcaggccgatcacatgaggtcaggagttcaagaccagcctagccaacatggtgaaaccctgtctctactaaaaatacaaaaaagttaaccaggtgtggtggcatgcacctgtaatcccagctacttgggaggctgaggcaggagaatcacttgaacccgggaggtggaggttgcagtgagctgagattgtgccactgcactccagcctgggtgacacagtgagactctgtctcaaaaaataaaaagactaatgcatagcttgggagtggggtgggaacaggaaaaatgcaagatgaaatgtcagagagctagctgttcttaccaagattcagccatttttataagtaaatgctccccagatagctccaagcctttggttaatttccagaatgctgaagaagttcattttgacatttttttttatcagtgttctcaatgcttttatggatgagaggatttccaggggtccttactctgccatttttgctgatgtctccagtcgttgaattttactttgaaaattagatgattacagcttttatttgtgtgcatattactattctgaaaaaagtcatttttgtattctagcgttatataaattagtgatttttttttacaaatgattttaacagaatcttactgaaaatcaagaagctcttgcaaaagaaatgcgagcagatgcagatgcctatagacgaaaagtggatcttgaagaacacatgtttcataagctgatagaagcaggtgaaacccagagccagaaaactcagaaggtaaaaatatgatccatttagtatacatgcagaggagaaattttcatctgtcaccctcttaagagaacaaaatcgaaattaaactctgtgaagttgagttagtttgtttctttgcttcagttgtcacagttcctagaatctcacattgcttccttttatatatgggatgcttacttcactgacaatcacatgatatgcatgtctttttcctacagtttgaggaaatacaaaggaatagtgacttacaagaaaatacaaaggagtagtgacttagaagaaaatacgaaggaatagtgacttaaaagaaaatgcaaaggaatagtgactttacaaattttactgtccttctgtgttctgcctctgaaattgtccctgtgttgattaggttcaaagcatcaggtccctgcatggtatgtaagccagcacttccaagtgtattgtgtggactattaactattattcaataagatgggggatggtcaaataagtattggaaatgctgtcttaaagtgaggtatttttcacgccaaatttgaggatttaagagaatttccaagatgtatttcagagaatttcttacggagtacactttcagaaatgctgacttaagtgaattgaaatagaacttgagactttcaaagaagagctttctctattatctctttaacaaaatgttaaatgggtatgtgtaccggtctgctcctattccaaaaaccaggaatagtgtaccgtagataccttctgttgtacaacagtctcttaggtgatttcctcaagatattccatttttttttaataggcttgtgtccagtctgttaaaatgggctcttcttcagagtctcctcttcagagtgctgaaaacatggaaattgttgaatcccacccataccctagccgataagttcttaaccttggctgtaaattagagtcacttgaagagctctttttttttttttttttttttttttttttttgtagagatggagtcttactctgttacccaggctggagtgcagtggcacaatctcagctcactgcaacctccacctcctgggttcaagcaattatcctgcctcagcctcctgagtagctgtgactacaggcgcgcgctgccacgcccagctaatttctacctgaagagctttttaaaggtgctggtaccccgctgtccagtgattggtttaattggcttgtggcagggcccagtcatcagcttattttaaacactcccaggtgattctaatatgcagccagagttgtgaacaactgccccagacacttggatacattgaatggttataccttcattttatgtactagtagtttgaccttgtttctgaaatgtataactttttcctaggtgattaaagaaaatttggcaaaggctgaacaagcatgcctaaataccgactggcagattcagtctttacataaacaaaaatgtgatgatctacaacgaaacaaatgttaccaggaagtagccaaactccttagggaaaacagaaggaaagaaatagagataataaatgcaatggtggaggaggaagccaagaaggtaaaaaatagtgttataaactttttaatatcaagcattgattttttttttttttttaaaagacagagtctcactttgttgtacagcctcgaaattcaaactcggggccttaagcaatctgcctgcatcagcctcccaaagtgctgggattacagacgtcagcccctttatccagcctaagcactgaaattttgaaatagtacagagtcaaatgacaaaagcatcataccaagtcgtttttgctggaaaagataatctgattttaataggtgtttgtcagagacgtcgtctaatattgattctacctaaaaatgactaagcgtctttctcatttacattagtgtgcttcaatttctcaacttcctggatttttgttctggctgattgaataatattagtactttaatttagctaattctttatacttacaatgtaaaagatgctgaataggtagaaatggtacgtagctgctagtaacaaaaccccaaattacagtgactatgaacaggatagaaatatagtctggaggtagggagtctagggttagtattgtggctccaaggttatcagggaaatgccatctttcagcctttctgcacctcttcttagtgtatggctttcattttcaaggttaccttaccatccaagatgactcctggagttccagccatcacatacacattccaggcagcggggagaagggagagcacaagtgcgaatgttctgcctcccatctgagtcacactcccttctaacttctttccaggagttccatatcatatttcaagccacatttgtcagcaaaggatgctgagaaaaatagtattcttcacagggagcattatcatcccaaataaaattaagattctgttcctatcagttaataagatagctaaaaataaaaacaaaagattctactgctaaagaagaatcaaagaatggagtccgaggaggtaattaatagtatatgtcacacgtgtgtatcttttggttgatcctcgcaaagactctgggatctgtgctctggagatattatcgcaggtaccatagactttcctaaggaccctgaggagctggggaaagatcaagatgtagatacctggcttaattgcttctctctgttgctgtatcacaatgtctattctgaaagctggcttcttacagtgtatttccttcaagtcactattccagattcattttcctcctaccccatcccagtggcatggagccttatcttataacccttccattctaggacaggaaagaagggcttggagagggtgggggtaatatccagaaccctgaggctgttctcaggaaaacaggggtggaagctcacattctcatcctaaacattgctgacactagggctatactgtgtgaaattcactgctgctggactttgggtaaaatggtacttttgagaattggctgagaatcattgtaggggcccttcacgttctgcagaaatccttccttgtgtctagtgtcttgcgttgtaaagctgacttgactactgcgtggccttgggaaattgctcagaatcagccccctcatcagtaacatgaaagggatggatttctgtgatccttccttaccctattttgtgattttttaaaaaagtttttgttatttaatgcattattatttctatagcataaaaattatgtgtttccatgtaaaagctgtagcttttccagaatttcggcaaactttaggagttggattttaaatttattttagttaccttctgagctaattttaagattattattttctcattttatggagaagaaaataagggtgaatagaaatcacttgacttccctgtggtcatcatgtggaccagagctgggcaaagagttcattctctgaattttgtagattttattattaagatagagcattcaaattaaataaaatgcaattgccactaattcaaaactagcttagtctcataagatttgagatttgaaacttattgaaatgcattattatttcagcaattattgggatatagttgtgtgctttgtggcactctgcaatactgggggttggataaaacctgcctctgctttcaaggctcttaatagccttgggccaacacaggcaccccagttaccataacaccaaacagatcctacttgccatgggaatataaaggaaagtggatagagaagacagaagtggctcattccactgtgaaatgtgtattactatactttttatgtaatctttttttccatttatttgaatttagtggaaggaagctgaaggaaaagagttccgtttgagatcagcaaagaaagcttctgctctttcagatgcgtctagaaagtggtttttaaagcaagagataaatgcggctgtagaacatgctgaaaatccatgtcataaaggtgagtgtctgagaggcctttctctccatgatgttacagatttattcttttagtagggtctattattatgatttttttttttttttgagatagggtcttgttctgtcacccaagctggagtgtagtgatgcaatcatggctcagtgcagcctcgacctcctgagctcaagcagttctcccatctcagcctcccaagtagctgggaccataggcgtgtatccccacacctagctaatttgttaaattatttgtagagatgagatctcactatgttgcccaagctggtctcaaactgctgggttcaaaccatcctcccgccttgcctctcaaagtgctgggattataggcgtgagccactgtgcctggccagtgaataaattattgggatgtattttggcacttctattcaatctactgctcaagtaaaaggtaatcactggttaccatatttttggtgggaaagggtgggctgaggtgggactattacagaaacagagtcccagtcgaggaaaaagtttgtgcagactgtcctgtggagttctgtttgattctgttgctccaaggtaaaatatgtactttgccaaaagctggtcctcagaacaacagtatattcaagtatcacatggaaacttctcataggatttgatccaacattaggtttcgatacaaggcttacagtggcatcaactgaaaaatcaaaattataatttaaaactgtaaaataccctggaggctgaggcgagaggatctctttgagcccaggagtttgaggctgcagtgagctattatcacaccactgaactctagcctgggcaacagagaagaccctgtctctttaaaaaaaaaaaaaaagatttccaaaaattatagagtacagttaacaaggagcttttattttactgtgttttattttgtttcagtcttttataatgtgtatacattgctttttaaaataatagctttgttgatacataattcacatgccctataattcaccttttttctttctctttttcttttttttttttttttgagacagagtttcgctcttgtctcccaggctggagtgcagtggtgcgatctcagctcactgcaacctccaccacccaggttcaagtgattctcctgccttagcctcctgagtagctgggattacaggcctacaccaccatgcctggctaattgttttattttagtagagatgggttttcgccatgttggccatgctggtctcgaactcctcacctcaggtgatccacccgcctcggcctcccaaagtgctgggattacaggcgtgcccagcaccgcacgcagcctaattcacctatttaaagtgtattattcaatgtcattatattatcatgtactaaaaaatacacttacatagtcatgcagccatcaccacaagcaagtttagagcatttttcagcacttcaaaataaacccagtacccattagcagtcactccccatttccactcactcccccaagcccctggcagctactaactaccttgtgtccactcacctattcaggaagtttcatgtaaatataatcatgtaatatatggtcttctgtgtctggtttcttgtacttggcataatgtcttgagattcaaccatgttgtagcatgtaccagtacttcattcctttttattgctgaataatattccattgtgtggatattatgtatttttttaatctattcatcagtcgatggacatctggattctttccaatttttggcttcatgaatatgctatgtgcattacttttacatttcacaaatttgaagagtgaaaatataggttaggtcatttaattatgcctacctttttttttttttaaagacagaacttcactctgttgcccaggttggagtgcagtggcacgatcttggcttactgcaacctctgcctcctgcattcaagaaattctcctgcctcagcttcctgagtcgctgggactacaggcgcatgccaccatgcccagctaatctttagtagagatggggtttcgccatgttgcccaggcttgtctcgaactcctggcctcgagtgatctggccactttgacctcccaaagtgctgggattatacctcacccggccaaatcatgccgactcttaaaaccactcattaccgctcatacttgagatttagtggtcccaaatagcaccaagagtacttcagggaggtggagaggagtagaatgtgactctgcacgaattaaatatttaaaactggcttacaaaagatactaatcatgggagctgtcacttctccctcaccctctcacacttacccttgtttttttttttggttgtttgcttttttgagacggagtctcgctttgtcgccaggctggagtgcagtggcacaatctcggctcactgcaacctccacctcctgggttcaagcaattctcctgcctcagcctcccaagtagctgggacaacaggcgcccaccaccacgcccagctaatttttgtatttttagtagagacggggtttcaccatgttgggcagggtggtctcaatctcttgacccttgtgatcctcctgcgtggccctcccaaagtgctgggattacaggcgtgatccaccgcacccagccttacccttgttttagaaagaaaaatagaaaatctttagagagctatctacgtagaaatagagaaaggtaagaaactgtgaaaagctttcgtcatcggtagttttcctacacctttgcccctctgcctccatgatgtcttcccttcgtgctaaattttttttggcagaccagtcagccatgtatgttttttaaccttgctgaatttcaccaatagagataatttgattaataaacatccagttttcaaaagtcttaagtttatgactgaatgatgtgtcagtcatgttcttaatcagggtatatagatttaatcagattcatttaatcctaaaagcaggagataatcacctaccattaagaaaatgacatttttgagcccggcgcggtggctcactcctgtaatcccagcactttgggaggccaaggtgggcagatcacaaggtcaggagtttgagaccagcctggccaatatggtgaaacccccgtctctactaaaaatacaaaaattagccaggcgtggtggtacacacctgtaatcgcagctactcaggaggctgaggcaggagaatcgcttgaacccaggaggcagaggttgcagtaagccaagatcgcaccactgcactccagcctgggcgacagagcgagactccatctcaaaaaaaaaaaaaaatacaaacctatatgtgttcaaaaaatacacatgttcaagacctcaccaatagtgatttaattcagtagatctaataatagtaataattccgtcagtagctctagggtagaaactagggagctagatttttgttttaaagtttcacgagtgaatatccccagccagtgtttgaaacattgctggagacaaaaggtaatcattagttgtttgaacagagataatatttacaacacagccctttgggaagatgaattgaacaggagtgggcaggttgaattttggaggacagatgagagggagctgtgagatctcagctctggctgggcacggtggcgcctgtaatcctagcaatttgggagactgaggcgggaggatggcttgagcccaggagttcaagaccagcctgggcaacatagtgagactgcctctaaaaaataaagaaacaaaaagatctgaggaaccacacctgattcgcgtcttgtctgtgcagcaaatgtagcagtggccagcgtgcttgtgccagaatgctggtagactgggaagctcgtgaccttattccatttgctacaagtattttattttggagttatttctggccaggcgcagtggtttacgcctctaatcccagcactttgggaggccaaatcatgcctacttttaaaacccctcatacacctgaggtcaggagttcgacctggccgacatggccaacatgaccaacctggccaacatggtgaaacctcgtctctactaaaaatagccgggcatggtggcgtgaacctgtaatcccagctactccagagactgaggcaggagaatcgcttgaacccaggaggtggaggttgcagtaagccgagatcacgccactgcactccagcctggggtgacagagcaagattccgtctaaaaaaaaaaaagtgttatttcttagtaaaatagttcaatctgctttttcttttctgtttttctttttccgctgagttctgtccgcagaaaccgttctctggaacagtgcagattgcagattacgtttactacctccgccatgtcccgcccttcagatgtttgaagatgactcttagattccagtcccccaccagttcaaattagtcattggtgattagtcacattactttaatgactcattgagctaaaactatgaggtaaaaccattagctaaagcttttcagagaggtaaaaggcagacatcttaccgatttaatgagactcccagcattctgggctcgacacatggagcttagatgctagcggtgggagtagaaaggaagggaccattataagccatgtcaggatgcaaatgtttttaaaaacaccttggtgtcatactggatgtgctgctgtaggagttagggaacagtgaaaacacagctgagggtgagtgtaagttttgagatgaggagagtaattgataaaagtaggggaggcaccactagttgctagggcactgccctgcctgctactctaagaagggttcgggtaaaacttgcctatggctggctctgatttgctgtatgttgtgatgaggccctgcctagctaaaaccagtagtgatcagctcataatagtttccagggaagccttgctgatcacatttcgtaatctctatcttaatatccatatttttgagtttgttggctttttgttttagctgaaagtgtttttaaagtacgttttacagaaatcagctcagctcttaattctcactaatgacacttccttgccttttgaatgttgaccgcattcttcttaaaatagaaaagaaaggagtttttagccatccttggtgattgtaacttactagggaccatttggaattagtaagcctttctactcactcccaaacatcatcttaatctcctcacttttataacagaagaacccaggttccaaaatgaacaggactcaagctgtttgcctagaacctcacaattaaatgactcttctgaaatggatccctcaacacagagtaagttgataagcaagaaaatgttattctgccattttaaatttcacaatatttaagcaaaattgtggcttaaattatatttatagcatgtggacgccattttcccagggcactgataatggaaatcctaaaagggaggcagcaagattctctcagattcctcagtgggagaactgggtgcagaccaaattccaagtaaagaaaatgtgctgaatccactaaagccactccagttcttgagcaccagcactgctgcccaaaaacatagttggaggttctaacagaagtctctaactaggttgataatatgaaattcataactattttgacatccttgtgaaaaaaaatctcagcgttgtttttcaaagctattgcatagttgaattttcttgactctgttcatttgggctgggctccctccaacaaccattgaaaacatgtgtctgccctgggcactccgatggaattctgggccccagcagcagtagaatggccaaaggcaaatggcttcatgctgatgagctgacttttgatccctggacgtggttcattggagggtttggggttttttagaagggacagggtagaaacatcttacagaaatgtaatcacagcattaggccatccataaagaagctaacaatcttcccagtaaagtatattatttatttttaaaagggaggaggagaaaagacactctgttaaacttactttcaactattttttttcaataaaattgccatatagatgaagcagtatttaacaagatcttttgacttcttttggaagaacaaacttttatacaatgtcccaaaaagacgagctttataagaaatatgcctaataccaagtcatgagattccagtattgtgtaaaatatttttgctaactcacatttttatatgcatctataaattctgtgccagaatatgaattaaaccaaaaatcattcaagagtcagatgaagtatgagagattctcagctactctctattctgacatatcaaatggttatttggcagcaaaatacaaaagcatgaaagttgtatttctttgggaggaaaaacagtttttcagaaattgaagctgactgactatttgaatatgtaactaaatttcagagaagtatatttttaagggcttttaaaaaaaatttcagtgttcactagcccctctaaatcagtaacgctcttacacttggacatgttgtagtattttaatcttgattctggaccttcctgatattagccaatattaaaaagcatttgatttacttatttttatttatttattggaaaggtaatcatggtgtatatttcacagttttatgacttggaatgccttttctcattactattaagcatcattgtgaggaagcttacagttgcacaaactcaaattctctcttaaattaacaagctttgtttctaacttaagattgtttgtatcccaagtatttcaaagcagagaagttctctgttagcattcattcagtccaacaaataattatttggcttgtaaatggaaccacctagggccaggttatatgtaaaatttaggttttagaattgcatttcattatttgtttttacaacacatttatctttaaaataaatgctgtatcaccgctaacatcagaaaactcagcttttctaaattttaaatttcgttttcaagtttctttaaatagaagagcagtagaatgggacaccacgggacagaatcttattaagaaagtgagaaatcttcgccagagactcactgcccgggctcgtcacagatgtcaaacccctcatcttttggctgcatagaatgcatgtcaccttgagacggtcgagagagagacctattttgcaatcagtgacattgatttttagattatttatttaaaattcctataaagatcagccctttgtacagaaaaatgtgtctataaaaattatgtgttatttaattctgatactttttggcttgtaaatggcttcttgaactttttacaataaaaatgttttagaaactgtt

SEQ ID NO: 39 - DNA, 43474 bp, Homo sapiens
agctccgagtctttcgttctgggaggcccaggcggcttcgcgttctgagaataaacagaacctctgttgctctgcgacttgcaggcactgggagattcgtagctaagacgccagggcatcccggaagctgggaaatggtgagtgtgcggggtcgggggtccccagagggagggagggcggtggtcggaagcggcgggaacccgctgtaggggcacccgggcctccccgcagtcagcctcggggtctgggccccgagtcccaactggtgcagctcggccctcggtcccctccgctgcaagatggcggccaggccggcagccgggaccccgcgtgtcctgtcccatcccgaccccgcagagcgacctcgtccctggccggagccctctctgggcagctccgcgtcgcagccccgcgtctcccccagattgtgcggtgaggacgggagcgtctcaggggagacccaggttcggtgtgtgggaagaaaccgtgccctgtggggtcctcagtcactactcctcttaagaattaaagggagtcactgttaaaacgttgaagaatttgagcaaatagcgatttgtgacatgggaagcctgcagtcctggtttgtggttcggagatccccagaggggcttgaaggaaaggtttttataaggtgcatgaggaagcagaccaaattaaccgatgggttacagtttgtagttgccttatttagactatgcaggtggaggtgaattggagctttgtggttcgttaagtctgaattttgttttcccctaaagttgtaatttacaagaaaagcatttgagtttggttttggtttttctccctagaaacctggggcactataaccacttccgtataatcgcctgctcattaatcatcttaacactgcccaggggaactggttttccccctgcgctttcctaacgtgtagcacgcagagtctcaagtccaccactgtgttcccccagtctaactgggcttgcaataaaatattaaatttccagttccttcccgacatttccaaaggccaacttcccctctccagttcacattcttaactattggtcatttattgtacatttcagacagtattttactcattaatcatgatttcacagagcagtggatgacacttttttaaagatttgtgtttttttggcatacatttcacgtgagaggaaagcagagaataaaaaatccctgacactccactgcaaaaaaaactgtgcctctttttcattcatcttccccaggcacagacacgttatcggaaagaatgtcttttgacttgaggttttgctttggaaactttacagggccctgtatagccaccctctatccagtcttttcctgttcctgaatttcagaactgtctgggatgactcaagatgcccacagtggccatgtctcctggagtgtttagtgactgtcagccccaggtcacctcctgttagaggaccgcccaaggtatggaaatgtagtccctcaggggagcagctggatgccctggggctgagagaaatctcctgggacacccttaacctaaaaagataaccccttgggacataaggattttatttcttcaaagctagttttcatcccttggagacacattgctggtcagccaatcgtttgctggtattgaggggaaacagtcacaaatgattcctgccccctagattcattcagatttgtgaagggagaaaaactcccaaaggaccaaaaaacaaaaaccccaccccagtgaggtggtgcaaactcggctgcggtgtccatggggcacagtgcaggatctgggaggatggtccctgagcattttaatgagcagtattggggtaggagaatgtctcaaatgataccgtgacctgacttgacacttgagccagatatgtctgtattccaacagcattaccactccctgagtttgctgccttagattgttcatttatttctacttcagtttttcagttagtgtaaatttcatcagtagagcttgaaagataaaaaacatttccaaggccatgaaaggtggatttcagaaaattaaaatatcaagtcatacttcattgttaaaaattcttactatcttttttttcagcagaatgagtgtagtaagtttctcaggtttgttctttttttgggagtaatttaaaacagaatctcagggctcaccttttggaaatgctgccagggaaaagaaacagagaaaatctttctttcattattggctgtagaaagtgaatacattttcacaacaacgtgtggtaaattggtgaattacatagtttcatcaaaacatcagtttcttttttttgtagggtgaagaagttatgacagtggatatctttgttctttatcctcttgtctggatgttgagtttattttttattttttgtttttggagacaggatctctcctctgtcacccagactgaagtgcagtggtgtgatcacagctcactcaacctcctgggctcaagtgatcctcccacctcagccttccaagtagatgggacttacaggggtgctgcgccatggctggctattttgttttttctttttgtaaagatgtgggtctcactgtgttgcccccagagtggtctcaaactcctgggctcaagtgatcctcccgccttggcctcccaaagtgctgggataacaggcatgagccaccatgcctggccttggatgtatggctttaatgctgaacgtagcactggctagaattgtttatatatgattatttactaaatgatctgttatcatggaaataagtaagtggcctatttattgtctgaaagggatagatactttagtgttttctgttgaggtataaattataaaggcgtttcactttcctttattctataaacactgtttgagtagttttgctttcttccaacactgggcattctcattgaatactaattgaataaccctgactgggaagcagaagcctgagctcagagagtgcaaactaacctggtcttgagcctgcaagaagaggtcactgaagcccagttagttcttccaggggagtttcccctgcaggtttcccagcctgctcaccccatccatggaaggagccctttatactgagaagctacagagccctggaaagctgaaagctgaaaatccacagaaagaggcatttggggttgggatggaaggagggttgggaggctctttctgagggtagaaattgtgattgtcctgattttggtttttcttcccagaaacccagggcactacaaccacttccatatagtcgcctactcattaatcattttaacactccccccacccgacaactggttttccccctgtgttttcctaatgtgtggcacgcagagtctcaaatctaccactgtgttcccccagactgaggcttgcagtaaaatattaagtttccagttccttccccacattttatttgattttgtcaaataaaacaaattcaggtttaggtaagaagttccttaattctaaaggagtattgcaatagggggaaagcaacagctgtaagatctttgtggatctcaaaggttaggcagacaaagactttctttcacagggaggagcaaacaagctcagaaggtaggaggggaagggcaggattaaggtgccaaaatcagattcgagatcagagaatgtttcactctgatgtcagcctgttcttaggaggggcttagggaggggttgaatgttgaccaggctgtgagtgtgtcaaagtccagcaacctggagaaaaatacaaagttttgttaagtagtttattctgaacactgaagacagagctgttcagctgagtcagaaggggaatttggagagtctgtggctttgtgatgactaaatcagggagcatcatcgaagtcataatagggttgttttttgcagtaggctgttcttggaaaacacaaaagatgggggatttctttaatcacagctatttaccaggttactgttcctattttttcccactacttttttttttgccctgtatgtatttatctcatttggctgttctgaactatatccttatgataacctgataaacataagtaaagtgatttgctgagttatttgagtagatctttgaaatgattgaacttaaggatagggttatgggtgccctcgatttacaggcagtagcttggaagtatagatagggccccaggcattgtgactggcatctgaagtgggggcagtgttgtgggactgagccgagaacttgtggggcctgcgctgactctgcgtggtgtcagaattaagtttttggcacccagttgatgttggaggattggttggtgttcagcaaactctacacatttgatgtcagaagacagacctcacagaggcctgggctggagagagactcccaagtgtctgtgggaagagaggctgtgttctgcacacaggctgccccactgtgcattgtcctttgattccaggtctcctgctagggtgagaagggactgaacactgagaggaaaggagttctgagaagagaccccctccccgacccagctgccaccacatgattcccacccactcctgaacataccaactaggcattgacatgtccccgtccatcccaggagaaggcttgactgtcaggaattgcacccacagcacctttgcttccggtttcctgccaaaaacccacacaagtgcctgaggactcctggcttgttgtaatcccagacactgaatccgtagcagcagcctagtttctccatcaacctaggcttgtggaccatccaatcataatctcatctgcctgcgtggacccagggatatgtcagagcatagtcccacctgggccagtatctgtagcacaaaccagtccttccaccaacttggtactgccccctgctcatggctcaatagcaccttcctctcttctgccttttacttccccacaagccccttctttatgtgtacacggtgttcccaaggtcaccccacaggtgcctgaatccagcacctattggaactcagatgtctgtgagctcaagaccatggcgctagatctggctgttgtaagagcaaatacaaattagaaatacaagacttaatccttcttgaaaataaggaaagaaatttttctttttttttttcttaaagcatttactttggaaaactttcatatgtaaattatttttctgttttacaacctgtctaaatcactcttaacagctaaataggccatttgtcagtctttttgactcagtactgcctttctctaggaactgggaatcattgatataaaatgtaaatagcaaagaagatagatccatatcctacagtttctctaggagggcaggcacctggctccaagttgcaaatctgcctgtcataaagacatgaagtttatttttcctttgactatagccaattaaaaaacacagatggcctcccaattcccaggtgaatttaggatgaactctctctgacaaatggtgctgtcaggtcttctattgaggactaattatggtgacttttcaccagtgggtatttttctaatctcttagcaggttgcctatcattcctttacattctgggctaattatgtcataaaacagttttctttcttttctaccactatggatagtttttctggggttggagatgattttatgattttcttcttcattatatttttcaaacattgcccagaattactacacagaatataaacctgtacgatgcctgtaagacttcactccagtgggtcctttccctctttgatttctgttcacaacccacatttgtgcagcaaagtgcccattgccccgaaaatctgcaggcagaatggtctttctgcttacttgggatcttcagtcgcttctagaatagtttgactagatttctataaaaataagtttacagggcatcagttagccattccagctctgtctttccatgcccctggcatcttcagacctgaaactgattcagagaccatgggggctggaaaccaaccaggcacacacatacattgagcaggccggagaatctcaacattcccttcatcctcttgcccaaatgcccatgaatgtgcagaaggtgcatgccacttccctgcgccaccagcacctaaatctgcagctgtgaattctgaacccaggtcctgaggttctccaggatgtgtgagagcagccttcctgaagggctgtctcctctagttttcttcacagcaatacacaagaattgcagagccaggttgattccacctggggtctgcacataaaggctggtctccacctgggatccacaagacagggccagactttggactcaggatatatagaaaatccaggggacattttctgcattgtgagagatcaacatggactttgtaaagccctacttttggagtgaggccctcagagttttcaagaccttgtccagtgagctacagcagttctgtgagtggttcctttttataaacagaatctcgtggcagaatctgtaagtgtaaagcagcaccttagcagagggagggtggggccaccactgtccagagccatgagtaaagctatgcctacctgtgagctgtgttactggagtagggtaatcttgtcctttcttgtacccaagagtcagctgatcaggtataggtaataacatatctggatcctggatctgtggccctactatgacaactcaattttctattctggttccacaaggacaacttgagtctttcctgcctgaatcactattgggttttcatcacacagttaccagggactctcttaccagcacctaggggacacttggttatatatcctgtgcaggcaggggacaggctgacaacgggctaatcttgcttccgtctcagagggagaagaatgagtcatcagggtttgtttcttttttaacagaaggaatctccttatttggtatccaagtgggagttgctccagttttctaatgtgtgggtgaaatacaaggaggagttctggagactcatactgataggtaaaccaattgcttccatttcatatggccactaggaaaacagatgcagcagccatagtccctaccatccaggaactttcagtctaaagcagacggataatggttgaattcaacatcatgtggtcaggagcaagaatggaggtgtacagggaacttgggcttgatttgggacactgcccttatgttgacgttgtgaattctgatgtcaccacccgaagggccacccgtggacaaaagagttgttattataattattatttatattgattttttcttgttaaagataattatgtagctactaatataattttcgtagaaagccctacatgttttggttaaattgcttgttgcatgttacaaaataggatgaagcttaaactatttaaacaaggcaaaccatgggagtcaagttcttgttggtcaggcttaggaaagacagctgaaaataaagcagcaatgtagagatgagaagcctagcccagcccctgccccagctctgcccaaatccagcctcttctgagcctggtccaggtctgtccctaccctggagcctcccctcacagaactgactagaggagatcagatttctgggtggccgctgctgccatctcttcagaggtggtgctcacaatttccccaaacccaaaagcaggtaaatgggagcacaggactcactttttcaaaattatttgaaaattaaatttttttcttattgaaaccagtacctttagaaacattccacctggcaacatctttttcatttctgcagatccagtagttgcttcacaagttgtcacaaagtcagtataaagatataaagagaataatgagaaattctttttcttcttcttttttttttttttttttttgagaccgaatctcactctgttgcctaggctggaatagtgtcatctcggctcacacaacttctgccttcccggttcagatgattctcctgcctcagcctcccgagtagctgggattataggtgtgccaccatgcacagctgatttttgtatttttagtagagacagggtttcacaatgttgaccaggctgatcttgaactcctgacctcaagtgataacacccatcttggcttcccaaagtgctgggattacaggcgtgagccaccgtgcccagtggagaaattcttgtgaactaaacttgactccttcctttctgtatccctcccatctgtctatagttagcttttatagtgatagggaaacaagaagaaatagaaaggctgagccattatctaaatcctgctgggaattatgggatacttaggacccatatcccaggggtttatatggcttaactcacaccatgtgatgttcccagcacagtacatactgtgagcacatagtacaagctcaataaacactgctttaatgcatgtatccgtgctgttttccaaatgctgacttagacataactgtcttctccagtctctgtatctgtagactttaaatggctggcaaagggtgtgatctttcaggacagtggttggtggtcctcactgtgaacgaaaagtatttttgttgtgattagagtattgggcgtaagggactctgtgctgtgtctgcttcctctagctgagtgctattgataatgggtctaggaggagcaacatcagcattgacaggggacttgttaaagaagccagttcatggaaactttccaaacctgcagaatcacattacttagagggggcccagaataccaaatgatatgtatgcgtattgaaccttgagaggcaatgcttagctaagtgattctcagcccaggcttctaagtagggtcacataaccagtttgaagatctatggtcacctgtatcttcccccacagattgtttttttatgattatattaagattatgatttactgttcccctccgcccatatcacagcaatgattatgggcccatctgtgcattagcactggtaccaatttgtcttattacagacgatgctaacttcattcacttggtgcaggtgctctctgtcagattccttcgctataaagttaatcatttttctctttgtaatgagtatctaggagggaggatttactgagtgatgtctataaaccatcacatttaatccagagactcccatttctttttggtttccctttgcttgtagctttctttgcagagtaaaggctctcacatttgttgacaggagataacagcttttaagactggaagttctgaagcaggtctcagttctgtaggtttccattttatttcatctcatgtcacaagcatatgcttatttattctctatattttcagagaaagaacaagaattaacatataacaaatatgtctattgtcttaaaattctaaaatatataatagcacatagaataaacataacaaaaacttgaaaaaaaataccagactcagaaacaagagcctttactttatttcattgtatgtattggtctttataaaggcatcacaaaaaaggcatcacccacaaagagttttatagtttttatacaatttaaaatatttttaaattttatttacacagaaatattatcttacttttagtgtgtatatagttaccattatgtgcacatatgcacataaaatgaaagcattattcgatcactattgtgtggctgctttcttgttttcgttactcagttacgaaatcttctctgaacattctgttaaggttgtctctgtatattggccggtatgtccctttgagataaattctaaatcagataaactgaggcaaaatacaaactactatgtagcaaatatttggaaaataatttttatataagaggaagaatataatttttctcagattatttattgggttttatatatgtaaacaacttttaggatgatatctgatatattgtgcatgttcaaaaaggattactaccattctagctgttataacttgtaaatttcataaaactctcagtttcacatcatgcctgaattctttcctcagtgttcgacctctctgctattcaaaagtggctttggggcctgaagcattaacactactggtgaacttgttagacatgcagatactcagccagccatggtggctcatgcctgtagccttagctactcaggaggctgaaacaggaggatcgcctgagcccaggaggttgaggctgcagtgagccaagattcaaccactgcactccagcctgggtggcagagcgagaccctgtgtcaaaattaaaaattaaaaaatatggaaatgcagaaactcaaaatctagatctcctgaatcagactctgcctttgaagaagatctccagtttattgttgtatactatacaatttgagaagtatgcctctaagtcaccatgacttttgcacctgagaattatacacagctgattctggatgatgtaaatatagcacccaaaaatgtatattcctgtgttgatgccttagttttatattttacatttgatataaatatctacactagttttgtggattttatgttattttctttccacagagtttgagactacattagaaaatattactgtgttaaaaatgatcttactgaataattcaggtcactcatatatgtcagaaccaataactgtcatttcatcttgggacaaatgaagaactctgccatggccacatggtcagtgtattctttatttttatttcagggactgttgacattcagggatgtggccgtagaattctctttggaggagtgggaacacctggaaccagctcagaagaatttgtatcaggatgtgatgttagaaaactacagaaacctggtctctctgggtgaggataacttgccttcggaatatctaataactaagagttttattttcttttcagaatgtcccttgggatcttgtgctttgtatgagttagttttagattcttgttttcaggaaaaaaataggggttttgttgaagtagaaaaaatttcataatgtttgattttgacattcgcctttttatttgaggtgatgtacaagtttcactctagtcgtgattctagaaattggttgacataaactattgttgcttacactttaaaatccaattttttttgtttgtttttgattcagtcagatttgcagaagctcaggatccccagatttaaaatgcttcctaaatattctaaagaagctggtaggaaacaatattttgagaaatacttttcaagaatcttctataatgtcttattttttctactgagcacagtactaagttagaaattaatcctgtcctgtggggccaaaaaaaagtataaaaataaaaaataaaaagaaccctcattaagagtcatgtgaatttttccaataaaacaggtcttgttgtctctaagccggacctgatcacctttttggaacaaaggaaagagccttggaatgtgaagagtgaggagacagtagccatccagccaggtaggtgggagcgaatgaagtagatgacatgggcgagaggtccagaagtcaagaaagaaccagaccttgaagtgtggattgggaagttctccagtggaaatgatttttgagacacctggctttatttctttcccttgctgtcaaagagggacatcttctgtcccatgctcttgaattatctgatgattctccttcctcttctgtgatccgccatcatattcacagtgacagccaaagtgctccccttggcctgtgagggcctgcttgatctgactgttcttccattgatttgggggctctgggaaagtctgtgcatgtttctacctctatgtgaaaccacttctaaagttctggttttgcctcatgtcagaagtgtgtgaggagagtgatggacagtggaatttttttcagaagtctcaggaattctgtggatagatgtcacatattttctgatacattaatttttaatcgtattgtggtttccaaggtgatcctatagaaattaagatgcagtaattttatgaaaatacaaggcatcttcccaaatctaagaaaatctaatcttatgtttcacttcaacttctcattttttctcacctgaactaagatgagaaatttaaactctataggcacaaattccacaaatgtaaaatagtttaatgtgtattacttattatatagacttcttatctaaatttttgtctatggggagcttagaacattgtccagtatataataaactctaaactgttgccttgtatcttaataactatcattctataattttgtctggttcagtatgaagcttactgagaatgtgtcctttagttccttttttttctttctagacatatgattctttccacaatataaatattatctatttaaaggttacatcttgatgatttgatatacatacacattgtgtaatgactaacacagcaaagttaattaccacatcagtcatctcacattagatgccaatttttgtgtgtgtggtgagaactcttaagatgtacactgttaacaaatctcaagtatactgtagtgcaggggtctatagtactggtctgtggcctgtgaggaatccgatcacacagcaggaggtgtgaccattgggccagcaagcattactgcctgatcgctgcctcctctcagatcagcagcagcatttgattctcataggagtgtgaacccttttgtgaactgtgcatgcaaaagatctaggttgtgtgctttttatgagaatctatctaatgcctgatgatctgaggtaaaacagcttcatcccaaaaccacccccgactcgacctccatccatggaaaaattgttttccataaaactggtccctgctgctgaaaaggttgggtactgctactgtagagtatcattaactatatttacaatgctgtacattagatattcagaatttatcttgtaaatgaaagtttgtacttgttaccataatgtctaccttgtttattcatccatgttgtcagaaattgcagtaccttcttcattatgtctgaataatattctatatattgtgaataattggctatgaacataggggtacagatatatctttgacatatgattttatttcctttggttatacaattagaagtagcattgaaggttcatataatactatttttaattttttttgaggtgccttcgtgccatttttcataatggctgaatcaatttacatttccactgacagtgtacaagggttttcttttctccacactctgactcttaatatttcttgactctgacagcagtcattctaacaagtgtgaatatttatttattgactctttgacagcagttatactaacaagtgtgagatgatatcttattatggttttacttgcattttcctgatgaataataacattgagaacctttttataaacttgtttgccacttccatgtcatattttgagaaatgtctacttgagtcctttgcaaatttttgtcagatttacttttttttttttttttgctatcgaattgtgtgagattcttaatattttggatataaaactcttatcagatctattttctcccagtccctgggtcgctttttcatgttctgtgtttgctgtgcatacacttttttgtttcatttaatgctacttgtttttattttttgctttttgttgcttgtgattttttgatgtgatagccagaaaaattattgccaaggccagtgtcaaagagatttttccttatgctttgttctagaagttatacagtttctggttttgcatttaagtgttaattcttttgagttaatttttgtacatagtataagtaaattttattcttttgcagatgactactttctttcagcattatttgttgaagagactatacttcccctttgtgtatcttggtgcccttgtcaaagtaatagttgactgtatgcacatgggtttctttctggtttttgtattctattccattggtctatgtgtctgtttttacgtcagtaccatactcttgattagtatagctgtgtaatagtttgaaatgaagaagtgtgatgcctctagctttattcttctttttcaagattgcatgggctatttggagttatttgtgattccattgaagttttataattttttctatttctgtgaaaaatgccattaaaatgtcaatacagatttcattggatctgtgaatcattttgtgaagtatggacattttagcaatattttttccaatccatgaagaagggatatttttccatttgtgtctttttcaattactttcatcagtgttttatagattttactggacagatctttcacttcttttgttaaatgaagttataaaatttaaaaaaaatttttgatactattataaatcagatttttttgtaacttttttctcagtttattgttagtatatggaaatgctactaatttttgtatatttttgtggcctcaactttactgaatggatatattagctctattttttgtttgtttggtatagtctttatggttttctgtatcttcaaatcacttcatctgtaaacagtgagaattttacttctttattcctgatttgaatgcctttttgtttctttttcttacctaattgttctggcttgatttctcactactatgttgaatagaagtgttgagattgggcacctctgtcttgtttctgatactagaggaaactttcagcatttcactgtttactctgttgagatggatacttttgtatgtatgttgtttggagtttttattatgaaaatgtatttacttctgttataggcttttaataaattttttgagaggattatatgattttcatctttttgttattgtggtatatcatttaaattgtgtatgttaaaacattcttgcatctcagggataaatcctacttgataatgatgtctgatccttttaatgtgtttttgaatttggtatctagtattttgttgagaatttttgcttgtatctttataaggaatattgttttgttacttttttgtagtgtccttatctggcttcagtatgagatgttggtggtctcataaaatgagtttgaaagtgcttttttctttcagttttttggaagagtttgaaaagtgttgacattgcttttttaaatgcttgatacagtttacccatgaagtcatttggtcatgggattttttttaaattggaagatttctgagtatttctgtcttctttctcattattagtcttttgggtatttctgtttcttcacagtgtggtgttctttctaagaatcaatttcttctaagttatctttttttgttatgtaattgttcataatagtttcttattttttttctttctgtgatatcagctggaatgactgctttttcattaatagctttttgagtcctctctctttttttttcccttggataatctaggaaaagtttgttcattttgtttttttttaatgactcagttttttgatattttttatttttctagtctctctctctctttgctctaatttttattatttccataattatgccaacactgggattattttgttcttcttgatcaagctccttgaggattacagttagattgcttatttgagatctttgttttccttattgtagaactttatcattttatacttctgtcttagaactgcttttgttacatctcagaagttttggtttcttgtgtttccaatttcatttgtatcaagacaattttttatttcccttttgatttcatggttgttcagaagcatgttgtttaatgtcaacactgtattagtctattctataaagaaaagagatttaattggtctacagttctgcagtctgtacagaagcatggcaccagcatctgcttggcttctggcgagggcctcagtaagtttgcaatcaggggaattggtaaaggtagaacaggcagtcacatggcaagagcaggagcaccagactaagttgggaggtgctacacacttttaaacaaccagatctcataacatctcactatcaaggacagcaccaaagaattcttgagggatctgcccctattattcagacaccccatattaggttccaccttcaagaatggggattacttttcaacatgagttttgtggtgggagactaaacatccacactgtatcacacacatttgtgagctttctagttttcctcctgctgttgattttctagttttacaccattatgataaaaaacttgatataattttaatcctaaatttaaaaagacttgttttctatttttggtttaacatatgatctatcctggagaatattccatgtattcttgagaagaatgtgtattctcatactgtttgataaaatattgtctatttagtttatggtgttatacaggtgaactctttttttttattagttttctctctaaatattccatgctttgttgtaaataggacattgaagttccctgttattgcatttcgttttctcaccacaggtatgttaatgtttgctttatatatttgggtgctccagtgttgggtgcatacatagttttagtttctatatcctcttaacaaattaacttctttatcatcatgtagtgaactcctttcctcttgtgacagatttttgcatggaagtctgttttgtctaatataaccaacaaccactcctgatttttggttgttgtttgcatgcactgtggtttctattctttaagtttatgtttgtccttaaatcaaaagtgagtctcttgtaagcagcatactgttagtttaaaaaaattcatttagccactctgtgtttattctagtctgttttgttttctataatagaataccacagattggctaatttataaacaggggtagtttatttggctcatgattccaggagcttggaaggcaaagaaaacgacattgttatctggtgaaggcctttttgctgcatagtaacatggccaaaggcctgagggagaagagagctcccttttataacagactcacttttgtgataactaacacactcccataaggacattaattcatgagggcagagtcccaatggcctaaccacttcttaaagatcccacctcttaattccatcacaatggctattaaattttatcctaaattttggaggtgacattcagtctataccagtatctgtttattggataatttaatctctttatatgtaaagtaattattgatacataaggatttactattacagttttattgttttctgttttatagtttctttttttctcatgctgtcttctgttaatttttggatttgtttttgttgtttttatgttttgatggctttttccatttgtgtatctactacagttttttcctagaggttatcaggagacttagataaaatatcttatatttgtaacagtctagtttaagatgataacaatttaacatctatccatagaaaaaaactccacagtttttctccctttcacacattttattactgtatatgttatactttataactttttatactgtgtattcattaacaaattattgtaggtatacttattttaatgcttttattttgtagcttttatactagagttaaaagtgatttgtacactaacgttatggtattagtgtattctgaatttcactatgtatttaccatttccagtgacatttatacttttaattttttgtgtgtttttcattagcatttgatatggtttggctgtgtccccacccaaatctcatcttgaattgtagcttccacaattcccacatgctgtgggagggacccaatgggaggtaattgaatgatggggcgggtctttcctgtgctattcttgtgatagtgaataagtctcacgagatctgatggttttataaaggagagtttccctgcacaggctctcttctcttgtctgctgccatgtgagatgtgcctttcaccttccaccatgattgtgaggcctcctcagccatgtggaactgtgagtccactaaacctctttcttttataaattgcccagtcttggctgtgtctttatcagcagttatgaaaacggagtaatacagtaaattggtaccagtagagtgaggtgctgctgaaaagatagatacctgaaaatatggaagcaactttggaactgggtagcaggcagagattagaacagtttggagggctcagaagaagacaggaaaatgtgggaaagtttggaactccctagagacttgttgaatggttttgaccaaaatgctgataatgatacggacaacaaaatccaggctgaggtggtcttggatggtgtattagtctgtcctcacactgctgataaagacatacccaagactgggtaatttacaaaagaaagaggtttaatggacttacagttccacgtggctggggaggcctcacaatcacagtggaaggcgaggaggagcaagtcacatcttacatggatggcagcaggcaaaaagagagggagcttgtgcagataaactcccctttataaaaccatcagatctcctgagacttattcattgtcacaagattagcacaggaaagacctgcccccatgattcagttacctccgaccaggtccctcccacaacacatgggaattgaagataagatttgggtggggacacagccaaaccatatcattccgcccctggcctctcccaaatctcatgtcctcacatttcaaaacacaatcatgccttcccaatagtcccccaaagtcctaactaatttcagcattaactcaaatgtccacagtccagagtctcatctgagacaaggcaagtcccttctgcctgtgagcctgtaaaatcaaaagcaagttggttacttcctagatacattgggggtgcaggcattgggtagccatttcaaatgggagaaattggccaaaacaaaggggctataagccccatgcaagtccaaaatccagcagggcagtcaaatcttaaagctccaagatgatctcctttgactccatgtctcacatccaggtcatgctgatgcaagaggtgggctcttacagccttgggcagctctgcccctgtggctttgcagggtatagccaccctcctggccgcttttactggctggcattgagtgtctgcagctttttcaggtgtccagtgcaagctgtcagtgtatctactattctggggtctggaggacagtggccctcttctcacagctccactaggctgtgcccaagtagggactctgtgtgggggctccaattccacatttcccttctgcactgccctagcagaggttctccctgcccctgcagcaaacttctgcctgggcatccaggcatttctgtgtatcctctgaaatctaaacgggggttcccaaaccccaatcctcgacttctgtacactcacaggctcaacaccacgtgaaagctgccaaggcttggggcttgcaccctctgaagccacagcctgagctctgtattggcccctttcagccactgctggagccgctgggatgcagggcaccaagtccctaggctgcaggcagcatggggaccctgggcctgacccaggaaaccaccttttcctcctatgcctctgggcctgtgatgggaggggctgccatgaagacttctgacatgccctggagacattttccccattatcttggtgattaacattcggctcttcattacttatggaaatatctgcagctggcctgaatttcttctcagaaaatgggattttcttttctatcgcattgttaggctgcaaattttctgaacttttatggtttgcttcccttataaaactgaatacctttagcagcacccaagtcacctaggttacagagctgctttaagattcacaatgagactaatgttagcagtcatgcctttatgggcacagatgtgtgtgccttcagggatgtctcaggttaagcataactgctcctgaactgtggctgcatgcagctggagccaggttacagtgccacttcaggtccacattcagataattgttgatggtcctatatatagaaccacagatagatttttttccctgagaatctctgtgtgggcaggactttttttccagaccatgggtgagaggtgaagaaggtgggttttgcctgattcatgtgtcacagacaggaccaaattctgcatgtatgtcacctaagacttaggtgggtataagttgtcctctgttcttggcagatggtcctagtgacaggacaaaggccaagtgggttatagctaagtctacagtgggatgtggcaagtttttttctgtagccaggaccatgatcagcaagcctgccacttggccaagggcaatgtctaaggtcgaccagcaaggtcacatttttcaaaagtagtgattctctcttcatgtcttccttttgggccatggctttatggacatcttcttgcaatttggagttcatttcttcaaatttgatgaaatcttttctagatttgaggaaaatctttcagatcctcttccagctctgtcacatgactggagagggcagccaggtgctctttcatttggctgtgctcccttgactgtttatgatttcttggaccacacttactttagcaaggtcttccttatagcttgaagaaccatcagaagatctctttccgttcatgtttgatgtattttcttgttcatggtttatgttaagcactccacctgttagtgttttttttttctgactattctgttgtttaagaatcattagctctttgtgtgtgacacctaattcttcttctaacaaactacatctttcaagtgctgctcataatcgcgctctcaccttttcatccagagctttgtgctgttcagataatgacttcagtgctttcagcacttcagcttcgctggacatgcctgctggagactgcacttgtttcttcatcactgtcatcctgagataccgctcatgcctggagacagggcattccaaatgctctaatagtagcctggtggtgttcctttctgctttcatttttcagcagtttcttctttcctttcaaggagctgttccctgcatacattgacttctttagtaagtgccgtgaactcctgtggaggtggagtgttgagctgtctctgcaaggaatctctttcatgaccaacctcgtgtgatttcccctgggttagtgccagcatttctggaatctcagtgtgttaagaagacagcctctttcttctagcatgcagaccatcaattgttcaaaatatgaaactgcgtctggctgtgaaggggagccggacccatggctcccacttcctcccagggggccttctgctttgctgatggccgacatcacctctcatatcatcttgcttgccatgggagctgatgaggaggctctgcagtgtctagcaggtgggtgtgagctctgggtgagctcgggagctgacgaaggcagcctgcggccagacattggtagacaaagtatttgcttttctacatatggcttatttcacttaacatgagattctccaagtccatccatgttgtttcaaatgacaggattttattcttttttaatggccgaaaagtatttaatagtatgtacgtacagcacattttcattatttatctgctgctatacacttgaattggttttatatcttggctattataaatagtgctgcaataaacatgggaatgcagatatctttgtcaaactctgatttcctttctttggggatatatacccagtagtggaattgctggatcgtatggtacctctatgtttgatgattttttgaggaatcttcataccattttctatagtggctatactaatttataattccaccaacagtgtttatacattcctattcttcacctcctcaccaacacatttttgttattatgttttgtctttttgattatacccattgaaactggagtgagggggtcccactgggtttggatttgcatttcctgtctgattaatgattttgagcattttttatgtacctgttggccatttgtatttcttcttttgagaatgtctagtaaggtcttccacacattttaaaattcggttatatgtttgtattatcttgaaatcttaaagcttcttatatgatctagatattaacaccttttcatatgtatagtttgcaaatattttctcacattgtttaggttgtcttttcactcagtattttcattttgtatttaaactctttttagtaggatataattatatttgctttttcttttgttatctgtgcttttcaagtctttatttttaagaaacagggtctcactctgtcacccaggttagagtgaagtagcatgatcatagctcactgcaggcttgatttcctgggctcaagtgatgctcctgtctcatccacttgagtaggctcactatagacacgtgccaccacacccagctagtttaaaacatttttttttagggacaggatctcactatgtagcccaggatgccctcgattcctgacctcaaatgattctcccaccttggcgtcccaaagcattgggattacaggcatgagcgagccactgcaactggccatgcttttgaagtcttatttgaaaaatattttccaagtctgtactaaagcatttgccctatgcaaatgccctatgcaaactatgaaatagtttgggctgattacacttaattctttaatccagtttgacttgatttttttggtatatggtgagtggtagcagtgtagtctcattcttctgcatatggatattcaatttttcctgcatcatttattgaggaaactgtcttttccccaaagtgtattcttggcacatttgaaaatcagtttgctttagatgcatgaatgcattttttggctcagcaggcatattggtctatatgtctgtttggtgccagtacaatactgtttagtttactgtagctttgtcgtaaattttgacgtaaggtattgtattgtctccggatttattctttttgctcaggattgttttggctattcagggtcccttgtggttccatataaatttagaatttttttttctatttctgtgaagaatgctggtgactttttgatcagagttgcattaaattcatagatcatttggggtagtatggccattttaattatatcttttcaatctatgaacacaagatatcttttcatttattcacatatattttattttttcatccatgctttgtagttttaatgtaggaatatttcatcttcttagttacgttcattgctaggtatcttaattttagtacttagtagtagatgtcttttacatctaaattggaaacgaggaagttaaatggttcctgttagagacaaaaagatcttacatttacaaaacctgaacacaacaccaaacaccaaaaaaacaaaacaaaacaaaacaaaaaaaacccagaaacaacaaaactgttaggagtaataaattcattaaagttgcaggatataaaatttcataattccattcacaatagctacaaaaagaaagtcagttcatttaaagttcatgtttgtatatggtacaaagtgaggtccaactttattctttcccatgcaaatttctagtatttctaacattctttggtgaggagactgttctttcctcattgtgtgttcttagaacccttgttgaagataaatttactatatacatgaggatttatgggctctctaatctttacatcatctataatacttgtctgtctttgagtaccacactgttttgattactatagctttgtaatatgttttaaaatcagaaagtagatgtctcctttttttccccccaagattgtttggctatttctgatttcttgaaattccatagatattttagaatattttaatacttctgcaaagagatctattgatattttgatagagagtacattgaatctgtaaatcaccttggatagtattgacatcttaagaatattgagtcttcaaactcttaaacaagtttgtgtgtttgagactgtttaatttctacatatttgtagacctgccagttttcttttcatttttaacttaaagctattctgttgtagtcaaaaataatactttgtgtgatttccatctgtttaaatttgttaagacattttatggcttaaaaagttgtctatctggaataatgtaccatatgtgattaaagacattgtgtattttgctgttgttgggtgacaagttatgtatatatgttaagtctaattgtctttagtgttcaagtcttctgtttccttattgatcttctttctgtttttggttttgttcgtttttgcattactgaaagtggagtatggaagtcttctactattattgtgctgctagctacttgcttcaattctgtgaaaggtcacaatgtatatatgggagctgtgacattaggtgcatatatgctaatgcttgttatagctttctggtcagtggacactattattattattatataatgccctttcttgtattttgtgacagtttttgatgtaatgtatattttgtctgatagtattttactttgcatttaatttcttttttccatgctttcatgttcagcccatgtgtgtttttgtatctaaagtgggtcttttattgaaagcatagagtcggatcttgtttattgaatttcagccaaattttgtcttgtgaatgatttaattttttttatgtacaaagtaattactgaaagggaatgacattgctttttgttttttattttagattttgtagcttttttgtttctgttttcctcttgctgtcttccttggtgttttattgatttttttttatagtggcatattttgattcctttctcatttctttttgtgtatctactataggtatttttgtggttaccatagatattacacaaaacatcttaaaattattaacaatttgtattaacctgataactttagtagcatacaaaaatcctgcctctctatgtccccttattgtattttattgaggtcacaaattatatgctttttattgtgaatccattaacacagatttacggttatttttaagtgttgtcttttcacacacataggctcaaaataaagggatggtggaagatctgccaagcagatggaaagcaaaaaaagcaggggttgcaatcctggtctctgataaaacagactttaaaccaacaaaggtcaaaagagacaaggccattacataatggtaaagggatcaattccgcaagaagagctaactatcctaaatatatatacacccaatacaggagcacccagattcataaagcaagttcttagagacctacaaagagacttagactcacacacaataataatgggagactttaacaccccactgtcaatattagatcaaggagacagaaaattaacaaggatatctaggacttgaagtcagctctggaccaagcagacctaatagacatctacagaactctccaacccaagtcaacagaatatacattcttcttagcaccacattgcacttattctaaaattgaccacataattggaagtaaaacactcttcagcaaatgtaaaagaacagaaatcacaacaaactgtctctcagaccacagtgcaatcaaattagaactcagggttaagactctcactcaaaactgcacaactacatggaaactgaacaacctgctcctgaatgactactgggtaaataaccaaatgaaggcagaaataaagatgttctttgaaaccaatgagaacaaagacacaacataccagaatctctgggacacatttaaagcagtgtgtaggtggaaatttatagcactaaatgcccacaagagaaagcaggagagatctaaaagcgacaccctaacatcacgattaaaagaactagagaagcaagaggaaaaaatcttaaaattacatagtgaaaggaaaatgtgagagatgtgcctaactgtggtgtttaggaacaggaagtctgcatacctgtatgtatttcaaagttaacaggctctctaatgcctagttattggttatacagattgcataatgccactcaatatttttatttaaaatactttataagcatattataaatgatatactcatatgagtgtattttctaataacctagattgtaatataaaacaaaaatgaatcaagaagtaaattgcaattaggacttcttaattacctttttagaaattaatctagctgccagttgcattttaattgaacccttggtgtcatccatatatatatacacacacacacacatacacacacacaatgtgtttatttatatatatatataaactgtgtgtgtagtgtattcatttccacaagatactgaaaattttgtgtcatctttgtatcctatatttccatgtaattagtaataatacagaattgtatcaggtaaattaaaaaaaaaagagagccatacagtcacacacacgagaaagtgtttgtcttttcaaatgtatagcagaattaaaagtattctatatactattattacaataataccgaatactttatttgtgtatattattaccttaaccagaaaactttatactgttacatgattttgtgttcctccctaccatcatgttatttttcaatataaagaactgactcctttagcatttcttgtatgacaggtctaatggatataaattcatttagcttttattaagaattctttatttctttattttttttcctgaaacggagtctcgctctgccacccaggctggagtgtggtggcgagatcttggctcactgcaggctccgcctcctgggttcacgccattctcctgcctcagcctcttgagtagctgggactacaggtgcctgccaccacgcccagctatttttttgtatttttagtagagatggggtttcactgcattagctaggatggtcttgatctcctgacctcgtgatccacccgtcttggcctcccaaagtgctgggattacaagcatgagtcactgtgcccggccccaagaattctttctttttttttttttttttaatttttaacttatttttatttttttatttattttattattatattttaagttttagggtacatgtgcacaacgtgcagatttgttacatttgtatacatgtgccatgttggtgtgctgcacccattaactcgtcatttagcattaggtatatcttctaatgctatccctctcctctccccccaccccacaacgggccccagtgtgtgatgttccccttcctgtgtccatgtgttctctttgttcaattcccacctatgagtgagaacatgcggtgtttcgttttttgtccttgggatggtttgctgagaatgatggtttccagcttcatccatgtccctacaaaggacatgaactcatcattttttatggctgcatagtattccatggtgtatatgtgccacattttcttaatccagtctatcattgttggacatttgggttggttccaagtctttgctattgtgaatactgccacaataaacatacatgtgcatgtgtctttagagcagcatgatttataatcctttgggtatatacccagtaatgggatggctgggtcaaatggtatttctagttctagatccctgaggaatcgccacaccaactttcacaatggttgaactagtttacagtcccaccaacagtgtaaaagtgttcctatttctccacatcctctccagcacttgtttcctgactttttaatgatcgccattctaactggtgtgagatggtatctcattgtggttttgatttgcatttctctgatggccagtgatgatgagcattttttcatgtgtcttttggctgcataaatgtcttcttttgagaagtgtctgttcatatccttcacccactttttgatggggttgtttttttcttgtaaatttgtttgagttcattgtagattctggatattagccctttgtcagatgagtaggttgcaaaaattttctcccattctgtaggttgcctgttcactctgatggtggtttcctttgctgtgcagaagctctttcatttaattagatcccatttgtcaattttggcttttgttgccattgcttttggtgttttagacaggaagtccttgcccatgcctatgtcctgaatggtattacctaggttttcttctagggttcttaagttttaggtctaatatgtaagtttttaatccatcttgaattaatttttgtataaggtgtaaggaagggatccattttcagctttctccatatggctagccagttttcccagcaccatttattaaatagggaatcctttccccattgcttgtttttgtcaggtttgtcaaagatcggatggttgtagatatgcggcattatttctgagggctctgttctgttccactggtctatatctctgtttttgtaccagtaccgtgctgttttggttactgtagccttgtagtatagtttgaagtcaggtagcatgatgcctccagctttgttcttttggcttaggattgtcttggtgatgcaggctcttatttggttccatatgatctttaaagtagttttttccaattctgtgaagaaagtcattggtagcttgatggggatggcattgaatctgtaaattaccttgggcagtatggccattttcacaatattgattcttcctacccatgagcatggaatgttcttccatttgtttgtatactcttatttcattgagcagtggtttgtagttctccttgaagaggtccttcacatcccttgtaagttggattcctaggtattttattctctttgaagcaattgtgaatgggagttcactcatgatttggctctctgtttgtctgttattggtgtataaaaatgcttgtgatttttgcacattgattttgtatcctgagactttgctgaagttgcttatcagcttaaggagattttgggctgagacgatggggttttctagatatacagtcatgtcatctgcaaacagggataacttgacttcctcttttcctaattgaataccctttatttccttctcctgcctgattgccctggccagaacttccaacactatgttgaataggagtggtgagagagggcatccctgtcttgtgccagttttcaaagggaatgcttccagtttttgtccattcagtgtgatattggctgtgggtttgtcatagatagctcttatctatgacgtcccatgaatacctaatgtattgagagtttttagcatgaagcgttgttgaattttgtcaaaggccttttctgcatctattgagataatcatgtggtttttgtctttggttctgtttatatgctggattatgtttcttgaatttcgtattttgaaccagccttgcatcccagggatgaagtccacttgatcatggtggataaggtttttgatgtgttgctggattcggtttaccagtattttattgaggatttttgcatcaatgttcatcaaggatattggtctaaaattctctttttttgttgtgtgtctgccaggctttggtctcaggatgatgctggcctgataaaatgagttagggagggattccctctttttctattgattggaatagtttcagaaggaacggtagcagctcctccttgtacctctggtagaattcagctgtgaatccatctggtcctggacttttttggttggtaagctattaattattgcctcaatttcagagcctgttattggtctgtttagagactcaacttcttcctggtttagtcttgggagagtgtatgtgttgaggaacttatcgatttcttctagattttctagtttatttgcgtagaggtgtttatagtattctctgatggtagtttgtatttctgtgggatcggtggtgatatcccctttgtcattttttattgcatctatttgattcttctctcttttcttctttattagtcttgctatgggtctatgaattttgttgatcctttcaaaaaccagctcctggattcattgattttttgaagggttttttgtttctctgtttccttcagttctgctctgatcttagttatttcttgccttctgctagcttttgaatgtgtttgctcttgcttctctagttcttttaattgtgatgttagggtgtcaattttagatctttcctgctttctcttgtgggcatttagtgctataaatttccctctgcacactgctttgaatgtgtcccagagattctggtatgttgtgcctttgttcttgttggtttcaaagaacgtctttatttatgtcttcatttcgttatgtatccagtagtcattcaggagcaggttgttcagtttccatgtagttgagcagttttgagtgagtttcttaatcctgagttctagttggattgcactgtggtgtgagagacagtttgttatcatttctgttcttttacatttgctgaggagtgctttacttccaactatgtggtcaattttggaataggtgtggtgtggtgctgaaaagaatgtatattctgttgatttggggtggagagttctgtagatgtctattaggtccgcttggtgcagagctgagttcaattcctggatatccttgttaactttctgtcctgttgatctgtctaatgttgacaatgggttgttaaatctcccattattattgtgtgggagtctaagtctctttgtaggacactacggacttgctttatgaatctgggtgctcctgtatggggtacatatatatttaggatagttagctcttcttgttgaattgatccctttaccattatgtaatggccttctttctctctttggatctttgttggtttaaaatctgttttatcagagactaggattgcaaccctgcctttttttgttttccatttgcttggtagatcttcctccgtccctttattttgagcctatatgtgtctctgcacatgagatgggtttcctgaatacagcacactgatgggtcttgactctttatccaatttgccagtctgtgtcttttaattggagcatttagcccgtttacatttaaggttaatattcttatgtgtgaatttgatcctgtcattatgatgttagctggttattttgctcattagttgatgtagtttctttctagccttgatggtctttacagtttggcatgtttttgcagtggctggtaccggttgttcctttccatgtttagtgcttccttcaggagctcttgtagggcaggcctggtggtgacaaaatctctcagcatttgcttgtctgtaaaggattttatttctccttcacttatgaagcttagtttggctggatatgaaattctgggttgaaaattcttttctttaagaatgttgaatattggcccccactctcttctggcttgtagagtttctgccaagagatcagctgttagtctgatgggcttccctttgtgggtaacctgacctttctctctggctgcccttaacattttttccttcctttcaactttggtgaatctgacaattatatgtcttggagttgctcttcttgaggagtatctttgtggcattctctatatttcctgaatttgaatgtttgcctgccttgctggattggggaagttctcctggataatatcctgcagagtgttttccaacttggttccattctcctcgtcactttcaggtacaccaatgagacgtagatttggtcttttcacataatcccatatttcttggaggctttgttcgtttctttttattcttttttctctaaacttctcttttcgcttcatttcattcatttcatcttccatcactggtaccctttcttccagttgatcgaatcggctactgaggcttgtgcattcgtcacgtagttcgtgtgccttggttttcagctccatcaggtcctttaaggacttctctgcattggttattctagttagccattcgtctaattttttttcaaggtttttaacttctttgccatgggttcgaacttcctcgtttagctcagagtagtttgattgtctgacgccttcttctctcacctcgtcaaagtcattctccgtccagctttgttccattgattttgaggagctgcgttcctttggaggaggagaggcactctgatttttagagtttccagtgtttctgctgttttttccccatctttgtggttttatgtacctttggtctttgatgatggtgacgtacagatgggtttttggtgtggttgtcctttccgtttgttagttttccttctaacagtcaggaacctcagctgcaggtctgtttgagtttgctggaggtccactccagaccctgtatgtctgagtatcagcagtggtggctgctgaacagcggatattggtgaaccgcaaatgctgctgcctgatcattcctctggaagttttgtctcagaggagtacccggccgtgtgaggtgtcagtcagctcctactggggggtgcctcccagataggctagtcagggacccacttgaggaggcagtctgcccattctcagatctcaagctgtgtgctgggagaaccactactctcttcaaagctgacagacagggacatttaagtctgcagatgttactgctgccttttatttgtctgtgtcctgcccccagaggtggagtctacggaggcaggcaggcctccttgagctgtggtgggctccacccagttggagcttccggaccgctttgtttacctactcaagcctgggcaatggtgggcacccttcccccagccttgctgccaccttgcagtttgatctcaagactgctgtgccagcaatcagtgagactccgtgggtgtaggaacctccgagccaggtgcgggatataatctcctggtgtgccgtttgttaagcctattggaaaagcgctgtattagggtgggagtgacccgattttccaggtgccgtctgtcacccctttctttgactaggagagggaattccctgacccattgcacttcccaggtgaggcagtgcctcaccctgcttcggctcacgcacggtgggctgcacccaccgtcctgcatccactgtctggcactccccagtgagatgaacccagtgcctcagttggaaatgcagaaatcacccgtcttctgcgtggctcaggctgggagctgtagactggagctgttcctattggccatcttggctcctccccccaaagttctttttttctaattcatttttaaagtatagtttgggcagatgtagtgttcatagtaggtagttgttattttttcatcactttcaatatatcatcctgccatcttctggcttgtgagattttttgctgagacatctgttgatcattttataagagtggccttgtatgtgccaagtcatctttttctttctgacttcaagattctctttgtcacttttgaatttctgattataatgtctcatgtgagtctctttgtgttgctgctagagttggttgaactttaaattttaggccattttctccatcaaatttggaaaattcttagtcattattacttcaaataaattttctgctctttttcagtttagaattctcatgagtatgttggcctacttgatagtatcccataggtttactaggctcttttttccttcattttttaatcctgtttgccttcctgacttcaaaatttcaaatgacctgttatcaagtgtgctggggattttttacctgctacatcaggtctgctgtagacctcatctagtgaatctttaaatttagtttttatttttacctccacactttgtgtttttataggtttaatctctgttcattttcatcatccattttctcttttagtttagttgtgttctcctttagttgtttgaacatttttaatataaatattttagccagttatgtggctcatgcctgttatcccagctactttggaggttgaagttggaggatcatttgaggccaggagtttgagacctgcctgagcaatatattgagaccctgtgtctataaaaaataataaatatggctgggcgcagtggctcatgcctataatcccagcaatttgggaggccgaggcgggtggatcacgaggtcaggagattgagaccgtcctggctaacatgatgaaaccccgtctctactaaaaattgaaaaaaaaaaaaattagccgggtgtggtgatgggtgcttgtagtcccagctactcaggaggctgaggcaggagaatggcctgaacccgggaggtggagcttgcagtgaaccaagatagcgccactgcactgcagcctgggtgacaacgcaagactctgtctcaaaaaaaaaaaataatactaataataaatacactaggtgtgatgatgcatgcctgtagttttaggtactcaggaagctgaggcaggagaatcagttaacttcagaaatttatgcctgcagtgagcggtgattgtgccactgctccctagtttgggtttttttgagaaatgtcccttcaaatcttgtgcccatttttgattggattattagattgtttcttaaagagttgtttgagctccttacatattctgattattgatcctttgtcagatgcgtagtttgtgaatattttctcccattctgtgggttgtttcttcactttattgagtatttcctttgttgtccaggtgctttttaacttgacatgatcccatatgtccatttttgctttgtttccctgtgctttaatacattacttaagaaatttttacaccaaccattgtcctggagagtttccccaatgttttcttgtagtagtttcatagtttgaaatcttaaagtccttaatccattctgatttgatttttgtgtatggtgagagatagggtctagtttctgtttttaatgaatagcttgtcttcatatatatggatatccagtttttttttagcactggttattgaaaaaaaactgtcctttctctagtgtatgttcttaacatctttgttaaaaacgagtccactcaaggtgtctggagttgtttttgggttctctattctgttgcattggtctgtgtgtctgtttttatgccagtaccataccattttgattactacagctctttagtgtaatgtgaaatcagataatgtgactccttaagttttgttcttttagcttaggatagctttgctattctgagtcttttgtggttccatatatattttaggattgttttttctaattctgtgaagaatgtcattagtattttcatagggattgcattgattctgtagattgtttcgagtagtatggatattttaacaatattgattcttccaatccattgacatgggatatttttcgtgtgtgtgtgtgtgtgtgtgtgtgtcctcttctatcttctatttcttttcttttcttttttttttttttttttttttttttgacgtatctccctcttgtcgcccaggctggagtgcagtagcacgatctcggctcggctcactgcaacctccgcctcccgggttcaagtgattctcctgccgcagcctcccaagtagctgggactccaggcatgcgccaccgtgcctggctaattttttgtatttttagtagagacggagtttcaccatgttgactatgctggtctcaaactcctgacctcaagtgatctgcccacctcggcctcctagggtgctgggattacaggtgtgagccactgcacccagccatcctcttcaatgtctttcattcatgttttatagttttcattgtacagatctttcacttctttggttaagttaatgtctaggtatttaattttatttgtggctactgtaaatggaattactttctaatctcttttttcagattctctgttggcatatagaaatgctattgatgtttgtatgttcattttatatcctgcaactttatcagttcttactgttttttggtggagtctttagatttttcttaatataagactgtaccatctgcaaacaagaataatttgacgacttcctttccaatttggatgccatttagttttttctcgttttactgctgctgtagctagcacttccagtactatgttgaataacagtgttgaaagtggacatccttgttatgttccagatcttagagaaaagactttcagatttttttcctccattcaggatgatactagctgtggatctgtcatatatggtttttattattttgaggtatgttctttctatacccagctttttgagagtttttattatcaaaggatgttgaattttattaaatccttttttcagcagcagttgaaatgatcatatgattttgtccttcattctgttgatgtatcatactgattgattgcatatgatgaaccattcttgcatccctgggataaatcccactttgtcataatgaacaatcttttaatgtgttgttgaattctgtttgctaacactttgttatttttacataaatatttattatagatattggcgtacagttttcatcttttgatgtatctttttctgatttgggtattatggtaatactggcctcaaagaatgagttgggaagtattccttcctcctgtgttttggaagtttttgagtagagctggtattagatctttaaatgttgggtagaatttagtggtgaagccatcaggtcctgggcttttctttactgggagactttttattatggctttgaacttgttacttcttattggtctgttcatgttttggatttcttcgttgtttaatcttggtaagttgtatatatctgggaacttacccatttttgttagattttccaattagttggcatacagttgttaataatagccactaataatcttttgaatttctgcagtgtcagttataatgtctcctttttcatctctggttttatgtgggtcttctttttttcttagtcaagctaaaggtttgtaaattttatttatctgcttaaaaaaatcaacttttcatttcattgattttttttgtattttttatttgaattttatttctgctgtgatgtttattataatttttgttttgctgttttttctttaagatccaacattaggttatatgatttttttcttttttgatgtaagcacatatatctatacatttctcagtactgcttttgctgtatcccataggttttggtatgtgttttttcattatttgtttgaagaaatttttcaatttcgttcttaatttctttactgatccaattttcattgaggagcgtattgtttaatttacatttgtttgtatagtttccaaaattcttgttactgatttctagttatattccattgtgggcagagatgtttgatattatttcacttttctgaatgttttaagacttgttttgtaacctaaaatgttgtgtatctgaaaattatctatgtgctgagaagaatgtgtgttctgtagccattagataaaatgttctgcaaatatttattaggtatatttggtttatagcacagattaagtctgatgtttctttcatgattttctatctgtaagatctgtacaatgctgaaagtggtgtgttgaagtctcaattattattgtattggggcctctctctttagctctaatactctatgtctcagtgctttagtgtagggtgcatggatatttaaaattgttatattctctgactgaattgatccctttatcataaaatgacatttgttctgtcttcacagtttttatcttgaaatatattttatctgatgtaagtatagctactttggttctttttttttgttttcattggcatggaacatttttccattcttttatttttcagtctatgtgtatctttatagatgaagtgtatttcttgtgggcagcagataattgggtcttcctttttctttttttcacccattctatgtcatctaattggagtgtttagtgcatttccattcagcattattattgataagtatgtgttcactcctgccattttgttatttgtttttgcatcttctctttcttttgtccttcctttctgtcttcattttagtgaacatgatttttcttggtggtatgatttaatttcttgctttttggtttctgtgtctgttgtatgtttttttatttgaggttaccatgaaacttacaaatactatcttataacctattgttttaactgctgacaacttcacactgattgcctaagtgaacaaataagcaataagaaaactagtaaaaactctacctttaactttgcttccccatttttcaactttttgttggttctctttatgtcttattgtactgtctttgtcttgaaacattgttgtagttgtattgagtcatcattgagtatttctacttgagtattttacacaccacagttaccatattataatactcagtttttctctgtgctattaccaatgagttctgtaccttcagatgacttcttattgttcattaacattcttttcttacagatggaagagaatgccccttagtattacttgtaggacaggtctggttttaatgaaatctctcagtgtttgtctgggaaggtcatttttttctccttcatggctatggaatattttcacgggatagactattctagtgtaaaagctttgctacttcagcactttaaatatgtcatgctattctctcctggcctgtaagatttccactgaaaatctgctgccagacgtactggagtttcattgtatgctgtttcttttttcttgctgcttttaggatcctttattcttaatttttgggagtttgattattaaatgtcttgaggtagtcgtctttgggttcaatctgctttgtgttctgtaacctggttgtacttggatattgatatctttatagatttgggaagttctctgatcgtattcttgaaactttctacccctgtctctttctctctttaaggctaacaactcttagatttgcccttttcagggtgttttctaaatcttgtaggcatacttcattcttttttgtcttctctacatattttcaaattgcctatgttcaagctcaataattttttcttttgcctgatcagttttgctattaagagactgatgcattcttcagtatgccaattgcttttttaacttcaatttctgcttgattccttttaattatttcaacctctttgtttgatttatctgatagaatctgaattccttctctattttatcttgaatttgtttcctcaacacaactatgttgaatcatctgtctgaaaagttacttattttgtttctccaggattggcctcttatgccttattcagtttgttaggtgaggccatattttactggatggtcttaatgtgtagatgttcatctgtgtcttggcattgaagagttaggcatttattgtagccttcgcagtctgggctttgtgtccacccttgttgggaaggctttccagaatttgaaggtacttggatctcaaactcaataacgttgttcttgcagactcatagaggtaccatgtggttggtcttggttaaaatcgatgaattatctggattaccaagcagagactcttgttctcttcccttagtttcttccagacgaatggaatttctttctctatgctgagctacctggagctggggtgggatgacataagcttccctgttgcccccaccactgggactgtgctaatttagacttgaagtgagcacagcactgggtgtcacccaaggcccagtgtaattactgcctggctaccacctaagtttactcaagaccttaggcctctacaatcagcaggtggtaaccagccaggtttgtgtctcctcaaggcagtgagttccctttggccccaggtaggttcagagatattgtgtgggagccaggtattgaagtcagaagccttatttatctcgtgttctattctactgcagctaagctggcattcaaattacaagacaacatccttaccactcctccctcccctttctgcaggcagaggagcctcacaatgtgtctgccaccaccaccagcccacaggggtttccactgggctatcactgatgttcactcaacacccaagcactcttcagtcagcttatgatgactgcttccacaactgggacttactctttggtgcagggcaggtccagaaatgctgactcagggaccctaagagtctgcttggtgctctaccccactgtggccaagctggtacctcaggtgcaagacagaatcccatttactttttcctctgctttgctcaaacagaaggtgtctttcactatacccaccacagtgggaaatgttctgggtcacacctgaagccagcacatctcggagtccaatgttcatgatgtgttattggggtaccactgtaggttattcagagaccagcagctcctaagtcagaaggtgatgaatcctgccaggtctctgctgtgatagggcagcactgggttcattgtagtcccctagtcactgtgctctccgtctcccaaatgaacagatttctccccgccatgcagatgctgctgaggggcaagggcaaggtggcacaagcactccctttccttcactgttggtgtcttagtagttcacgtgccactttattgtagtaaagtttgtatatcaattgagaaaacacggcctcaggtttttcactcaactgttgttgtattctcaacttagcataattttgtatattagatttgtaaaatatatgtacctgaatatagtaattggaattcttaaaatttttatatctttcagatgtgttttcgcattataacaaggacctgttgacagagcactgcacagaagcttcattccaaaaagtgatatcgaggagacatgggagctgtgatcttgagaatttacatttaagaaaaaggtggaaaagggaggagtgtgaagggcacaatggatgttatgatgaaaagacttttaaatatgatcaatttgatgaatcctctgttgaaagtttgtttcaccagcaaatactttcttcttgtgccaaaagctataactttgatcaatataggaaggtctttactcattcatcattgcttaatcaacaagaggaaatagatatttggggaaaacatcacatatatgataaaacttcagtgttatttaggcaggtctctactctaaatagttaccgaaatgtttttattggagagaaaaattatcattgcaataattctgaaaaaaccttgaaccaaagctcaagccctaaaaatcatcaggaaaattattttctagaaaaacaatacaaatgtaaagaatttgaggaagtctttcttcagagtatgcatgggcaagagaaacaagaacagtcttacaaatgtaataaatgtgtagaagtttgtacccagtcattaaaacatattcaacatcagaccatccatatcagagaaaactcatatagctataacaaatatgataaagatcttagtcagtcatcaaatcttagaaagcagataatccataatgaagagaaaccatacaaatgtgaaaaatgtggggatagcttaaaccatagtttgcaccttactcaacatcagatcattcctaccgaagagaaaccctgtaaatggaaagaatgtggcaaggtctttaaccttaactgtagtttataccttactaaacagcagcaaattgatactggagaaaacctttacaaatgtaaagcatgtagcaaatcttttactcgttcctccaatcttattgtgcatcagagaattcacactggagagaaaccatacaaatgtaaagaatgtggcaaagcctttcgctgtagttcataccttactaaacataagcgaattcatactggagagaaaccttataaatgtaaagaatgtggaaaagcttttaaccgtagttcatgccttactcaacatcagacaactcatacaggagaaaaactttacaaatgtaaagtatgtagcaaatcttatgctcgttcttcaaatcttattatgcatcagagagttcatactggagagaagccttataaatgtaaagaatgtggcaaagtctttagccgtagttcttgccttactcaacatcggaaaattcatactggagaaaatctttacaaatgcaaagtatgtgctaaaccttttacttgtttctcaaatcttattgtgcatgagagaattcatactggagagaaaccctataaatgtaaagaatgtggcaaagcctttccttatagttcacaccttattcgacatcatcgaattcatactggagaaaaaccatacaaatgtaaagcatgtagcaaatcttttagtgactcctcaggtcttactgtgcatcggcgaactcatactggagagaaaccctatacatgtaaagaatgtggcaaagcctttagttatagttcagatgttattcagcatcggagaattcatactggccagagaccctacaaatgtgaagaatgtggcaaagccttcaactataggtcatacctcactacacatcagagaagtcatactggagagagaccctacaaatgtgaagaatgtggcaaagccttcaactctaggtcatacctcactacacatcggagaagacatactggagagagaccctacaaatgtgatgaatgtggtaaagccttcagctataggtcatacctcactacacatcggagaagtcatagtggagagagaccctacaaatgtgaagaatgtggcaaagcctttaactctaggtcatacctcattgcacatcagagaagtcatactagagaaaaactttaaaaatgtaaaacatggagcagattttttacttgttacccatgtcttattgtgcatcagataatttatatgggagtgaaaccctacaaatgttaagaatgtggcataacctttaactattttcaagccttacacaatagcagagaatataaactgaaaaaatccatacaaatattaaaaatgtggcaaattattttaaactgtgctcaacccttactcaagataatccatactagagaaacactatagatgtaaaaatgtgaaaagttttattcaaaatatcaaacttatgagtcacctaggggttcatagaaaaaggaagtttgcagatgcaataaatgtgaggaagtatttaataaaaaatgaagtctaaatgtgtcagagaatttatgtgagaaaggactaaagcacagacactttcagcctttatactaaataagagtattttttgtacagaataatctaaaggcaaaataattagataatttatttgcttatatgttttaaagtagcaagaacattgatgttttgacaggtatatttcatagatacttcatttgtatttacagtatttgaggtttttggaaagcaaatattatttatataattcagctttcaaatctgttgctgcttttccttaatccgtggtgttcatgtgaaaatatgtgttctgtttttttttctgcatcagaacaatgtgaggtcattctacgttaatatcattaatatcagcatttttcatggaagtttaatgccaaatgtaaaacacatgaaaatttttaaaaatatgctctttgtgtttgaataaagtagtaatgcatgtaaaca

SEQ ID NO: 40 - DNA, 23557 bp, Homo sapiens
gcgatgacctcatccctggtgtgggatgacgtcaaattcaagatggatggaatcacagcggcagcggcggctgcggcgcgcgcgagccgagtgtgagcggaaaggggcccggcgtctgcctcgagactgaagaccggtgagtaactgtcacgcccctagctctaggagaactgcggggctccttgggaggctacagcctccccgcaaaacgcggcctttcctgacgtaactctgaggtgatttctctcctcttttttctccaccagcgggttgcgggctccgagcgcttctgcgcgtgcgcgggacctgggcgctcaccgagcatgtcccgggttcccacgtagccgattgtaccttcacactgcgcacgctccctgccagcacttggcctcgccctcgcgaatgcgcatgctccattccctcacgggcttcactcttcaccctggccgagctgcccctggggtaggggacacgcctggcccaggcgcgcgcccctcgcgcggagcggttgaaacgcctcgtggagaagggcgcgttctcctgttccgggcaggggttgggggccggcggcccgggccgcggggtgtgcgcggaagctggccggcggccttggggaccccgcacctgccgcgacccgccgctcccttcacggtccgggacctagccccgccgccccgtcctcggcccggtggccggagcgtgaccgctcggtgcccgctggacgctccctccccgcccccggcccctcccgcggacgcctggacctcacagcgcgttttttttcctccagagcccccgcagaccttgtctgggacttcccggcggtcccgcagagcatagcaccctccgccggccaggagccctgctgctcggccggcgaccgtctccccgcttggaggagcccccttccccccgtccgaggtccgcggctggaggggcagggagtcaagacgccacccgtgccggccttagagacgcccgcggcagccccgccacatctcttcccggcttttcgggaacacgccccgtagtccatcctcagcggctcctgcttttccatcccagcacaccgctgggggctcgcactctgcccccggttgctatgcggtcccagccacgagggctctgcggttcgggagaattccgcaagagcgcgcgttcggaggcggggtgtttttagacaggtgccccggtgggattgcctgaccgagaggacggggaaagttagacttcacacggcctggggtttttcctttcgtgcaagcgctcacagccctggcaccgagcctccgagggcacgcgtgtgttacaaaatagtccagcgattgttcacacgatgaccctgagtcctcaattaagcagcttacattacggtcctcataccttgtttaagaagacaagaaagtgggttaatccattttagaaagatttctcatggaaaattatcttttaaagctttcctcgtgtacttggagtaaatgatgatctctaaggactagtagtcattaagtttaaatttaagcacccctaaatattgatgttaaaaagaaagtcaaaatttgaagtgctggtttacttaaaagtaactttttgtttatttttcctttttaacactttattgaaagtataatgtgcttcattctgttgaaatagaagttgaagaagatataacccctgccctcgaggaacttacactgttgaatattagatgtgtacactctgaaggaaaaattgtaaataacaaaattggggttaagttaagaaggtctctcgatggaaatgagataattaaagggacaattttttcttttcttttctttttttcttttttttttttttttttttttgacagagtttcactcttgttgccccaggctggagtacaatggcgtgatcttggctcactgcaacctccgcctccctggttttgcaacctccgcctccctggttcaagcgattctcctgcctcagcctcctgagtagccgggattacaggcttccgccacatcgcccagctaattttttttttttttttttttttttttgtagagacggggtttcatcctgttgaccaggatggccttgagatctcctgacctcgtgatccaccccacttggtctcccaaagtgctgggattacaggcatgagccactgcgcccagccgaagggacagttttagttgtccgcaaagccaatggaagtagagagagcagattataagctatgtaagagctaggtttgaccaggtcacagtgataggctataagggaaagagaagaaattttagggtctggcaacacaccaaagtaaatcgggaatatgtgaggacaaacagatgtgggagcagggacgagagttgtggagtttaagtaccatgctggacctgaggatatactgtgatggaaccgttcagtaggtacctgagaggctggagcctcaagagtctaaacagagatacagatttgggaatcatcgtccagtagtgattaaagtcacaaggtctaatagaaaaagcaaagaatactgccacgttttggggctctgtaacggatgctggagaaataaaggtgagccagtccaggtcttgagcctcaagtttgatgatttctctctttgccctgtacctagcttgccaggccttgtgctgggcatcagggatacgtgcatgcaaacaagggttctttctttagggagtcccttgggggagacacatgtaaaagaagattaattgaagaagttgtggtgttattacagagagatgaagtattgtggtagtttagatgactgagctgctggctaggggcaaattacaaaagctttgtagagtcggtgacatttcaactggatctttcgaaagaagttagccaagtaaaggagagggaagagagagattttgggtggcagaggctggatatgcaagtttgtagagtagatggtaagtagtgtccaataagggtggagagatgaattgtaaccagagtatgaaaagtcttgtatgccagtctgtagtttggattttctttaggaatagaaaaatcagtacagtactccaaagcagggcagtgatgtaatacgctttacttcagcaaaacaactaacagccataattttcactcgtgcatttaattggagtgaagagtacagaaaagtcaaatctttattgttgtggaagataacatgttgagcattgataatgccaaaagatattaaatagattatcagtctttaaatagctttcagtcctcttggggagacacaaatgactaacaataaaggcagtgaataaacatgtaaatggtgctgaagttgaggtatttgcacgttataagatgaagtagtcaaggaaggtatattcatttgcttgggctgctataacaaagtactgcagactggatgactcaacagatttcttttcccacagttctgaaagctagaagtccaagaacaaggtgtcagcagggttggcttcttctgaggcttctctttggcttatagatggcatcttcttgtccctacttggtccttcctctgttcatgtctctgtgctaatcttcctctcctgtaagaacaccagttacatcagtttaggggtcaccctaaagccctcattttaacttaattacctcttagagaccatgtctccaagtatgactacattctccaggtactggaggctaagtctttatcatataaatttgggagggaagagtggggacacaattcaacccataatggaagattttatggagtagctggaacttgacctgagctttgaaaggtgattaatattctgagtagtgtgctgaggaggggtttaggtgagttctaggactttccagattggggagtgggagaagtcagatgtgcaggttaggtcttagagacagagtatctggagcagaaagggatcactagggaataactaagggaaagaaaaaaaaattttttttttttttttgagacggagtttcgctctggctcagctgtcacccagtggtgactggagtgtagtggcacgatctcagctcactgcatccttcacctcccaggttcaagcgattctcctgcctcagcctctcgagtagctgggattacaggcgcccgtcaccacacccggctaattttcgtatttttagtagagacagggtattaccatgttggccaggctggtctcgaactcctgacctcaggtgatccacccgccttggcttcccaaagtgctgggattacaggcatgagccaccacacctggctaagaaaattttaaaagtcatttgaaaccagattttatagagacctttagtcattgttttaaaaattttagcctaatggagaacaattgtttttattattttatttttaaacaggatcaaagctggttctcttcattcagatcttaggtctcagctgaaatattccatcaaggtattttctgaccatcctctctaggcactgcatccagcgatatagcaccttatttatttccaccataacttttagcagaatctgaggttgtcttttttatttgtttccttagcatctgatttatctcactagaaagtgggggtcttgtctgtttggtgcacccctatatttcagataaatctaaccatgccttgtacagaattggaattcagtaaataagttgaattaataataggaatatttaacgtgtatgttgggtgagcgatcaaagctttgttctaagaagctcagtctagaagctgtattaggatgggtttggaaggcatgacaaggaacagtgaataccacgtggaaatatattagggttctttaataacaagaacagaaactgtctggcttgaatggaaaaagtagtttattgtaaagatacagggttgctcttggacttaaaagaaaagctaaaaaactgggccaggaagaaggacaaaaaccaagctaactccaggaatctatgtagcaggcactagcaaggttgcattttcaggcctccgttgagataagtcagcttcatttatttattgcctttgtcattcttctcaggattcatattccgaggacaaagtttctgattggtttggctttggttgtatggttagcccagaggtaggggagaggagcacatcaggctgtagcacacagtgggacaagagcagttcttctatagcaaaatcatggggctgttaacaggaggtggaatggctgtgtagtggctggaagaaaacagcaaaggctgtgaccagagtctgctctgctaaggtgcaaaggagcttgaactatgttggagtaggatcattctcctgaatgtggccaagaacaaccatcaaaccaaaatcaaacccccttgttagagactgaaagtgtggtgaaatggaatacaagatagtaacatgactcctcttgaaggattggataagctagtctaggtttgaaatctgaggatatttgcgttgtcaccaagtgagtgatgataagaccgaaactcagaggcaacttcctatcaccatcaaatagtaaaatccaatggtaggtgttacggctaaatcctgaaatgagggtttggggataagcagtctgtgtgtgtgtgtttatgttccaaagtcaaatgtagatgctttgtttttttaactaggtatttgccttgtgttacatgcattccctcttttttctagtatcatggttaggactatagaagcaatccccaacattccaaaggacccatgttcccagagttgaaatctaggttgatgctggatgtaaagagccattttcctgtagaactggtagtagcagttttgtggctagtctgggagccaacttaatttatagtgtaccttagctatgacactagtccaagtaggtgagattattttgatccctttccatctctgtttctcaccccctcactcaccccctggtacccttctgagtgccaagtcgctttgctttcctctgcttctcactagaatgctctatattcgaaattgcctaccttccctctccctcaaaaatcttaattccatacaactgatttaacactctataaagaggaaagtatttgcattgaattaatttatgttaagatatgaggccgggcgcggtggctcatatcttacaggtggctggcctgtaatcccagcactttgggagaccgaggtgggcagatcgcctgaggtcaggagttcgagaccggcctgaccaatatggtgaaaccccatttctactaaaaatacaaaaattagccagtcctggtggctggcgcctgtagtcccagctactcaggaggctgagacaggagaattgcttgaacccaggaggcggaggttgcagtgagccaagatcatgccactgcactccagcctgggtgacagagtgagactcttcaaaaaaaaaaaaaaaagatgtgagatatgagtcccccacccccttagcatttattacctgaggaatttgaagtgatggtatgaaataatcttctggaatccagttctgaagggttttgtagccattccagggaattggaagttgaggccagggcaagcccttggaaggttttaagccccagcaaggccagatgagcatttctgaaaagcgtctatagtagaaatgtaaagaatggaacctttagtattagaggttgactatcccttatctgaaatgcttgggaccagaagtgtttcagatttcagattgtttgggattttgaaatattctcattatacccagtggttcagcgtccctaatccaaaagtccaaaatgctctaatgagcctttcctttgtgcatcatgtcgttgctcagaaagtagttttgggtttttggactagagatattcagcttgtattataattgtcaaaggagtgatgagtcccaagccttccttaggactattcactcatagttaatagtgaatagttcccactattcactcttccaccctcctacaccctggccaaattaattgcttcctggaatcagtattcccgtagcattcttcacatcctttgttaattattgtctgtcctaacatggaaatgtgagctacaggagaacaagaagcaggccagttactcatctccccatcaccagcacctcttgtgatgtgtggtgggtagcaggcccacgcaagcatctgtgaggggaagtggagaaggaaggaagatgtgcatgtgccacatgggaagtgctgaacgtactggggctttcaaacatgttgcctcttctgtccttcataaaaatcctatgtggtgggtagtgttagccatgtttaacaggtaaggaaactagtcagaaaggttgagtcatctttagaaggttccatgcctaataggtggcggagccaggatttgagacaaatagactgattcgaaaggcttttccatggaactgtaaggtcttctgtgaattgttaaccataaagattctctcattttgaaatttcagaagacatgaagtagaaacaatccaggaaggctttgggaagctatttgtgtgcgaggatcaaagtggtaagcaagccggccctattttagaaactggttttcctggggggttttcctcttagttttttctgttgctcgtaaatagaccttttctccaaatttcacccactggtcttttaagagctccaaggtttttccaccatgactgaagtggcagaagttctgccgtgatgagtcaggtggagatgagccgtggaaaggaggggcgtagacggtggtggcagcagtgcgtgtttatgtgtaagatgcactgcttctgtaagtcggaggccctgattactcataatgaaaacctgcatggaaatttggagtgatgtgccagcaaacttatcggtctagatctgaaaaatacactgaggagaaagtacacccggcaacaaagctcgccttatctgacagcagaagagcagagaaatcaaaagtttttgaggattcggtgtacacagccaccagccacaaacagtcttgctggattatctcgtgatcgtcagcagttgtgattttccccctttttacttacattcttgatggatggagcattttatatttttaggtaattgttaaactcaaatatactgactgtcattaaaacacaaaaattcaatatgttaattgtctgtctgcagccagactaggaaagggtacattgttttcaaaacttaataattgaattaaaatgtaaaaaaaacaagggccttaatgtgaaggtgagggatctgcatctcctagctacccctgtctcctatctagacatctagagtctctagatcctggggtactggggagaatggacaatgttgctttcctgtgcaagatcctcagatgacatattttagcccccagggcgctcatgcctccatcttcctccagcctcatgggcatttcctcccctatgtgtacctttacctttcaccaggcaaagccacctgtggttcccttggattcctcctgctctgtcttgtctctgtagtgttgcatgtactgcagcccagccagctgatgtgaatcttgccctgctacttattatctgtctgacattgagcatgttacttaaccctctgtgcctcggttttctcatctgtagaatggagataataatagtacctaactcctagggttgatgtcaatattgagttaatacattaaaagtgttttcttttgtgtgtgtggcagaataagcacccaaattatagctgttattgagtacctagttactgttctactgaaaggaatggaaaataaatactcgtccctcgaaatgtccttcatccttcctatctcttcccagcattccctataaaactttcttcgtagaacgcccttcctggcctccatctcacctggctctgatgcctgtcatctatactgcgtctctacctctgcaaacatcctgtctgctgctcagcatactggactaggctgatgaattgacctgttctcttcctgcacaagaccttaagctccatgaggcagggccatacttgttaaattgatatcttccatgtctagaagggttctagcacacactagacagatgctagccataagtctataattgtctgggtgaccttaggcaaatgacttgacctctcaatgcctcagttttctcatttgtttgtaaaaaggattgatgacactgtctagttcagaagatgatacgagaattggaagaggaaactagaggcagtgtcgtgtaggggttaagagcttagcctctggatccaagccagctgatgtgaatcctgctctgctacttatctctatgacgttgagcatgttacttgaccgtctgtgcctcagttttctcatctgtaaaatggggataataatagtacctacctcctatggttgatgtaaatattgagttaatacataaaaataacttctttatttttgtgtatgtgacagaataaacacccaaattttagctgttattaagtacctagttactgttctactgaatggaatggaaaataaatactctataaagttattctgcacttgtgtatcaggaatttggacatcttgaggcacttttcaggcaggtgtgatggctctaaatggaggttataggaaagttaagttttaaatccccaataattttcagggacagtgagtatttctcttacaacttaactttgaatgactttattattgtcccctagtccatagatgttttcatccaaagaagatagaggtctgtgatccaagaaatttgaagcagtgacttagagcagaaatagggatcatgatactttgaataatgcataaagaaggaaacctttctaaacaaaagggacacaaatgttgcttttttggcaacgggatgcatacggtctgtggaataccatttgcttcaggtccagggatgtagaaaactccccttggtttagtcttcacactaaagggccaggacaagcccttggaagggaggttttagtgtgaagtggttagccgttacctgtgcttcgagttctgtttgtgtcttagtttggattcccccaaaagtagaccccaagacaaggattcagaggtagacgtttatttgggaactgatcccaggaagcacaagaaaggaagtagggacagtaaggcggagatggaggctcataaagggtacattgatgaacaggttgctgctcacgtgtaggatatcaaaactgaattctttaaaaaatctgaactcctggtttttctgtcaaaccccatctctcctaaggatgcccttccagttattttggcagaatacttaactccacaccttctgttttctcctgcagtctgtccactagaaattctaatgactctgcctttacctccgttgctaccaccctggtcccagccaccatcctctctcatctgggtcattacagtggactgcaagctggcccgcagcttcccccataacctaccctctgttgtctaatctcaacaacagagccagagcaatcctttggaaatgtaattcaggtctttgtcattcctctgctcagaatcttcaatggctgtccatttcatccatagtaaaaaataaagttcttctggaggtctcccagccctagacggtcttacttcttattgcctctcagatgtcatcttacatggctcccagcacacactgctccatccctcctgttgccttagcttctccctttgttgtgatgttcttcctccatttatctccatggctcatccctcgcctccttcacaccttctttgatcccattttgatgaatgaatgacatgagaagtttctggtatagtttgtagtgtaggttcctgtacagttaggtgctatataaatggtagcgactattattatcttatttaattcccacaatagcattatgtggtagctgctagtattatccttattttatggcgaggtaaactgaggctcaaagaggttggttagcctagaacagtggctctcaaaatattttgactgacccacaggaaggaatacattttacatctcaatccagtccatgcttgcttatgtgggtatgtacatatatataatagaaacaaaagtttctcaagctcataattagccttatgacatttgatgcattctgatattttctactctgtcctagtcatttattttttaattgctagttttaaaccaccaagttgagtttaagaaccccttttgacaaagactatccaagcctttaaatctgtacctttaattctgtgttacagcttttccctgtggcaacatctgaactagctttgtcaaaaattattagtgctaaaaactcctcagtacccagctgagtcaatacgtgtaacattataagcttatgtctttttctgctgatctctgtaaaagatggtaagggtttcttcatacaaatagatgtaaagaaagtatagtaggattaaggaaaatttaaatgactaagagaagaaaaaggaagggaaattatcaagtagtcacaaatagaataattttttaaaaaaatagaggaattaaaatttaccatttactttgaaaggatggtaggcgggagtggacagaaacttggtacagtctgaccaaagtagttgtttgtggacaggctaaaggcatcatctctagaagcaaagtcctgtgtctcagtcggttaaattgagtcgcatcttatcagggagtcagaaggaattgtataccgtgtgtggccactcccaggttgacagcctaggagactctgggctcttcctgaagagcctggtggctggggtaaccagcaaaggccagaagagaacctacaaatgagctggggtcaagtttggttcatctacagtttgcccgctagagaaagataaaaccgtcacagatagttacttgggattcatgtaatcttaaaaataaatgtcttaacaatatttgaaagaaaatatggcattataaaatgaaagggatgagccagctgtggtggctcacacctgtaatcccagcactttgggaggccgaggcaggcagatcacgtgaggtcaggagttcgggaccagtctggctaatatggtgaaaccccaactatataaaaatacaaaaattagctgggcgtggtggtgcacgcctgtaatcccagctactcaggaggctgaggcaggagaatcgtttgaacccaggaggcagaggttgcagggagccaagactgagtcattgcactccagcctgggcaacagagcgagaccctgtctagaaaaaaaaaaaaaaaatgaaaaggatgaggtgttagaggaacagaagcctaaataaagggtcaaatacacagagtcaggcattgtctctgcatgaaatggctttgtctgcatcgagagtatggtggggttaatctgcccactttctttgatactgaattagatgcctattaatcctgcaatttctgaaagttaagtgcacatttgttgagttttctttagatgaactctttgcaacaaccctgcaagaggagggcacagttgtcattcctaactcaggtgagggatctgccacaccgagaggctaacagaaacacccaaggacaatcagccagcctgcaaggaactggcatctcaacccaagtgtctggcaccagagcttgcactctaccactaggcctcctcttctcatgtttagatttgaagagcatttcagtgaaatatcagtttaaactctttaattaaatttagaactaggctaaagtttcctttgtgctattgttgaaaatgtgatttggtaagaaaatagtattcatgagattgcaaggcaaatagcataagaaagaaaacaaacttattcttcaacacttctaatcttttttttgtttttttgtttttttgttttttttttttttgagacaacgtcttgctctgtcaaccaggctggagtgcagtggcgcaatcttggctcactacaacctccacttcccaggcttaagtgattgtcatgcttcagcctcctgagtagctgggattacaggcacatgccaccaccctcggctaatttttgtatttttagtagagatggaatttcaccatgttggccaggcttgtctcgaactcctgacctcaagtgacctgcccgctttggcctcccaaagtgctgggattacaagcgtgagccaccgtgcctggcgtaaacactttcattagtaattagcaaataattttttgctttccaaattcttttctatttttaaaggtctcttggccaggctcagtggttcatgcctgtaatcccaacacttggggaggctgaagcaggaggatctcttgagcccacgagttggagaccagcctgagcaacatagtgaggccccatttctaaaaataaaaaataaaaaaaattacccaggtgtaattagtccattttcacaatgctaataaagacatacctgagactgggtaactaacaaagaaaaagaggttcagtggactcacaggtccatgtgactggggaggctgtgtaattatggcagaaggcaaggagtgcagggcacatctcacatggtggcagggaagagagaacttgtgcaggggaactcctcgttatgaaaccatcagctctcctgagatttattcactatcacaagaagagcataagaaagacctgcccccatgatccagttacttcccactgggtgcctcccagatgtggggaattgtgagagctacaattcaaaatgagattttgctggggacacagccaaactgtatcattccaccctgggcccctcccaaatctcatgtcttcacatttcaaaaccaatcatgcgttcccaacagtcccccaaagtcttaactaatttcagcattaactcaaaagtccacagaccaaagtctcttctgagacaaagcaaatcccttccgcctatgagcctgcaaagtcaaaaacaagttagttacttcccagatacagtgggggtacaggcattgggtaactacagccgttccaaatgggagaaattggccaaaacagaggcttacaggccccggtgcaagtccagaattcagcaggacagtcaaatctcaaagctccaaaatgatctcccttgactccatgtctcacatccaggtcaagctgatataagaggtgggctcccatggtcttaggcagctctgcccctgtggctttgcagggtatagcccccactcctggctgcttttatgggctggcattgagtgtctgtgagttttgcaggcacgcagtgccagctgtcgacgtatctaccattctggagtctggaagatggtagccctcttctcacatctccactaggcagtgccccagtggggactctatgtgggggcttcaaccccacatttcccttctgcattgccctagcagaagtttctccatggggccctgcccctcatggaggggacacagccctgcagcagacttcttcctggatatacaggtgttctcatacatcctctgaaatctaggcggaggttcccaaacctcagttctttacttctgcacacctgcaggcttaacaccacatggaagccgccaaggcttggagcttgcaccatctgaagccatggcccaagctgtaccttggcccctttcagccatggctagagcacctgggacacagggcaccaagttcctaggctgcacacagaaagggggccctgggcctggcccacaaaaccattttttcctcctagacctctgggcctgtgatggaaggggctgctgcaaaggtctgacatgtcctggagacattttccccattgtctgggtgactaacattcggctcctccttacttaggcaaattcctgcagccagtttgaatttcttctcagaaaatgggattttcttttctatcgcactgtcaggcagcaacttctccaagcttttattctctacttcccttataaaacttaatgcctctaacagcacctgagaacctcttgaatgctttgctgcctagaaattccttctgccagataccctaaatcatctctctcaagttgaaagttccatagatctctagggcaggggcaacatgccaccagtctctttgctaaaacataacgagtcacctttgcttcagttcccaacaagttcctcatctccatctgagactacctcagcctggatttcattgtctgtatcattattggcattatggtcaaagccattcagcaagtctctagggagttccaaagtttcccacattttcctgtcttcttctgagtcctctaaactgttccagcctctgcctgttacccagttccaaagtcgcttccacattttcgggtatcttttcagcagtgccccactctactggtatcaatttactgtattagtccattttcacacttctaataaagacatacccaagactgggtaacttacaagaaaaagcggttcagtggactcacagttccacgtggttggggaggccttttaatcgtggtggaaggcaaggaggagcaagtcacatctcacatggcagcagggaagagagaacttgtgtaggggaactcctctttataaaatcatcagatctcatgaggcttactatcatgagaagagaacgagaaagacccacccccatgattcagttacctcccactgggtccctcccacgacgtgggaattgtgggagttacaattcaagaggagatttgggtggggacaccaccaaaccgcatcacctggcaaggtggcatgtgcttgtggtcccagctactcaggaggctgagtgggaggattgcttgagcccaggagattgaggctgcagtgagccatcatggtgccactgcactccagcctgggtgacagagagataccctgtctcaaaataaaaacaagggtctcacaagacctgctttgcaaccaattgttaacagttcacattatgtttaagtatatgtagtaataaagctgattttctttcagaattatagacttcaggggtttgataattcgtacttgttttctgaattggtaaggaatagtgccaagcatcaaatggataaggaccctaaataataaacctttattttcaaatattgcttccatatctacctgccaagttctggcagcctttttgatgatatacaaatgcctatattatagttcctgcaattcttctattttaatgaggacctacttaaaccacgagacttattttacattttcaccattatttaaataagattgttcattcatagagcttctgttagcctacggtctgctaaatattggtacctatgcaaagacagctgatgttccctgctcttgaggagccaggggaacttttcactgcaatatctgtagtaattttacattttgtcttttagataaactcaagccatggagggattactgcattacatcaaccctgcacacgccatttctctcctaagtgccctgaatgaggagcgtctcaaaggacagctgtgtgatgtgctgctgattgttggagaccaaaagttccgagctcataaaaacgtcttggctgccagcagcgaatactttcagagtttattcacaaataaggaaaatgagtcacaaactgtatttcagcttgacttctgtgagccagatgcttttgataatgttttaaactacatttattcttcctctctatttgttgagaagagcagccttgctgctgtgcaagaacttggctatagtcttgggatttcctttctgactaacatcgtttctaaaacacctcaagccccctttccaacgtgtcctaatagaaaaaaagtgtttgtagaagatgatgaaaacagttctcaaaagagaagtgtcattgtttgtcaaagtagaaacgaagcgcaaggaaaaactgttagtcaaaatcaacccgatgtaagccatacttcccggccctctcctagcattgcagtcaaggccaataccaataagccacatgtcccaaaaccaatagaaccacttcataatttgtcattaactgaaaagagttggccgaaagatagttctgtggtatatgcaaagtctcttgagcattctggatctttggatgatcctaatagaatcagtttggtgaaaagaaatgcagtgttgccttcaaagcctctgcaagacagagaagctatggatgataaaccaggtgtgagtggtcagcttccaaaaggaaaagctctagagctggctttgaagagaccacggccacctgttttgtctgtttgtagctcatcagagactccctatctattaaaagaaactaacaaaggaaatggtcaaggtgaagatagaaacttgttgtactattcaaagttaggcttagtgatcccatccagtggatctggttctggaaaccaaagcattgacaggagtggcccacttgttaagagtctcctcagacggtcattgtcgatggatagccaggttcctgtctattcaccttccatagatttgaaatcttcccagggatcatcttcggtgtccagtgatgcaccagggaatgtgttgtgtgctttatctcagaagtcatctttaaaagattgtagtgaaaaaacagccctagatgacaggcctcaagtgctacaaccgcatcgcctcaggtcctttagtgcttctcagtcaacagacagggagggagcttcccctgtgactgaggtgcgcataaagactgagcccagcagcccgctgtcggacccctcggacatcatccgcgtcactgtgggagatgcggcaacaacagcagctgcctcatcttcgtcggtcacaagagacctgtctctgaaaacagaagatgaccaaaaagacatgagcagactcccagcaaaaaggaggttccaagcggaccgaagattgccgtttaagaagttaaaggtgaatgagcacgggtctcctgtgtcagaagataattttgaggaaggctcaagccctactctccttgatgcagattttccagattctgatttgaataaagacgaatttggtgagttggaggggacgagaccaaacaaaaaatttaaatgcaaacattgccttaagatctttagatcaacagcaggtcttcaccgtcatgttaacatgtaccataacccagaaaagccctacgcttgtgacatctgtcacaagaggtttcacaccaacttcaaagtgtggacacactgtcagacccaacacggcatagtgaagaacccatcaccagcctctagttcacatgctgttttggatgaaaaattccaaagaaagctgattgacatagtgagagagagagaaattaagaaggccctgatcattaagttaaggcgcggcaagcctggttttcagggacagagtagctcccaagcacagcaagtcatcaagaggaacttgagatctcgagccaaaggagcttacatttgtacttactgcggaaaagcgtaccgctttctctctcaatttaagcagcatataaaaatgcatccaggagaaaaaccccttggagtaaataaagttgctaaaccaaaagagcatgctcctcttgcaagtccagtagaaaacaaggaggtttaccagtgccgcctctgtaatgctaagctctcttctctcctagagcaaggaagccacgagcggctgtgccggaacgcggccgtctgcccttactgcagcctcaggtttttctcgcccgagctgaagcaagaacacgagagcaagtgtgagtataagaagctgacctgcctcgagtgcatgcgcaccttcaagtcctctttcagcatctggcggcaccaggttgaagtccataatcagaacaacatggcacccaccgaaaacttttctttgcccgttttggaccacaatggtgatgtgactggttcttcaaggccccaatcccagcctgagcccaacaaagtaaaccacatcgtcaccacaaaagacgacaacgtgttcagtgattcttcagaacaagttaacttcgactcggaagattcctcttgtcttcccgaagaccttagtctttccaagcaactgaaaatccaagtcaaagaggagcctgtggaggaggctgaagaagaggcacccgaggccagcacagcccccaaagaagcgggtcctagcaaagaagccagcctgtggccctgcgagaagtgtgggaagatgttcacggtgcataagcagctggagcgtcaccaggagcttctgtgctctgtgaaaccatttatttgtcacgtgtgcaacaaagcttttcgcactaattttcgactctggagtcacttccaatcgcacatgtctcaggcttcagaggaatcggcacataaggaatctgaggtgtgccctgttcccacaaactctccctctccaccacctctgccaccgccaccaccactgcccaagatccagcctctggagcctgacagccccacaggcctgtccgaaaacccaactccagccacagaaaaactgtttgtgccccaagaatcagacacccttttttaccatgccccacccctttcagcaatcacatttaaaagacagtttatgtgtaaactttgccacaggacattcaagactgcatttagtctttggagtcacgaacaaacacacaattgaaagaccaacactttttacctatgggaggcagtccccagatttcaacctgaattgtgaaatgtgtcataagaaacaaaatattttttaaacaagaataataaaggttggagattgttacgcttgaaattaagttggaggcaaattgataattacttagtaatgtccttaactttagaaatacagcttttaaaatattgtggttctggaccttacaagaacaagatggtttgatttcattaatgttgaaattggattagtcttgattgtgtgcatggttcctcattccatggtgtcagtataatcatttaattgaggtttttggttttttattgattagtggaatactgtcgaagtattccttcttttaattattttagacacttgagttctagttaaatcttaaccatgttcttaagtccaaaataggaagaagtggagtagtttgcagtattgatttatatcttagactactttagcaataaaagataaatctcaactttaataagttatcctgacacttgataaaaataaatatttggtattttgtggtcatgtaaaacttctttttgtatgaaaattgtgagaaatttaaatcagcaatagtaacacttagatttttataaactaacaaaaacttgctctcagtcaatataataaatgatagttaaactctaaggaagacctgggaaatgaaaacaatttatggaagtcccctacagtcagtttataagggcttcagtagtgatagacattgttataaaaacttgtaccatgttacatgtacactgcaccacagtctaaattcagaccagcatttgaaggactgcacatatttcatttcctctgatttatgctgtcacaaattgaaaatctgagtgtagttaggacaaaaaacaaagctaaccatatggcactaattttgattttaacattagtgtaacaaataaggtcgggacatatatttacatagatcccagacactcaagaattagcacagctgatgtaaaattctaaattaccatttacttccagatagagcagaggagaaacacctcactgcagtttcaacatgctttccaagaacaatatatacgacatatacattttcctgcctctctcttgtgacaatttctgttagaatttgttgggggtctgatggttaaaatcatgggcaaggccattctctacatcattgcttaatatttcaaaaataggtattagagcactatcagtggtccaaaattagttttagctacttattttgctccatgggttttgggcttttcaaagaatactatgtataatttgtaattgaaagcctttcagtaggatatccaaagttcaatgtgtttcaaaagggaaaacttttacttgtgggggtgggagttagatgtattaaaaaaacgaaactacaaaatccttttaagaaagtaataccaatttagactctagtttgtgttacgaggtattctttcaaattttttttaaaagccaactactgtcattaagaaataattttagatttgtgctctagcagaaaataactctgtacccatcaatcttattgccaacattccataccagtggtaggaaagatattctcattttttttattgaaccagacatttttataaaatactgattgactttgtacattatggatattatatatgaaattttgccttgtattctttcacttgaaaaaactccaaaattccacaatattttagtagttaacttcctattctttcttaaatttgatggagaagggaaaataaattgcagttattgattcttgccatctttgttttcttaaagaaatctatgcattttaaggataaaactaaagcatatgggtttacatgaaacatcaggatggattattgtacattgaattcattccgcgtataatgtggtatttcttactctgtccatcttggtagctgtcacttcaaaagaagacagtttccctgagtaatcatcacctacatggccattagagtatctatcggtgataattccatgatacagagtatcttggcattataaattcagtatcccaggacctaaacctttatgctacattttcgaagattttttaaaaataatattgttaatcagtaaaaaaaaaaaatatttttgatctaaacataggttctgcatatctgttagattttaaaaatgactggtgttttgtcttcacatttttgtctaagcaaggaatataagatttcaaataaaattttgaaccaaaaacatttataatgccgttctggtttttctattactttttatactgtactttaaaagcattaggctgaaagagtttattttggtggtcaaaaaaaatatgcttccactcatgtaactattttaaatgttaagaagtaaaataatgaaagatatgttaattactttattcagtaaagttttttaagaatgtttatctcagccagtaggcaaatacttggtgtaaaacaagttggtcttaaattgttgcaactcattagctagtgaagatattcatgtaaatatattttaggattgtaattaattttgaaaatgtagaaagctctttattccatgtaagtatgcaggatgcctgcttttttatgcagttgtggaaagaatgtaaaatgttttaatatattctttgttaatctgagaacttgatactgaatcgtttatgtgggagaaggaaggagtaacataaaacatgtttttatcactcaaagtaagcaatggaggtaacaaatattgtgcattttaacagtaatatttgaagatttgtagaatattcacctttaaaactagttagtatgcatttataattttaccagaatatacaactaacaattcaacagtgatgttctttgcatttgtggggagatgtgtgatgttcttggttttctggtttggaatggaacgtttatagccttgcctgtaaaaatgtgccccagcacttaatgagtgaccgtttgaatccatatgtagtcccattggtgctaatgagagtagctgctgtgaaacaggaataaaatgtgtctgttcacggaggtgcggtgtggatgcacctacaaggccaactctctgatcagggtgagggagagatggaagaattaacagatctaaagttggcctttgttgtctcaaattgggtttgtacacacatgcatgcatgtgtgtatacaactgtaatctggaacttcaggaagtaaaattatttgaagtttcttagtaaaaagtaattaggtataattccaaatagatttctgtataaattgtatctaactggattacaagtcagtttgacaatttacgatgtctcagtgatgtttctgcaataattgtgaaatgcattattgatttaaataatgctgacacgtactctttaaaagtgttctttaacactgactactaaactttaagttttaaaaaataggttttcatttatggctttttgtggttttagcactttaagaagtttaattttttgtaatttttaatatgctctttcagtgtatctcagcgggtactccagcttgtggcattcccatgtgactggggagaagacaaaattggtgtttagattctggaggagaaaaaatgagttacaatgtcaggtgtttttaaaaattccttttagagacagtcttttgggaaccaaagtattttactgtaaatctttaaaataacagaattcagtgctctttcatttgttaatgctgtccagatttttcacacagttatactcagttaatactagttttcagaacattagtccaaggctatttcaagttttccattgaatatatgcttatggttaaaagaaaaacgaatggttttataattctgtgtattttgtcatatgccttagcagagtaagtcatttttccattttacttaggaataagctttttcgaactgaaaattcatggtaaaataggatttctatctaatgttaatccattgcttatttgtattcaattccattgtctacagtttgcttaaatgttgactaagaatgattggagtcaataaatttgtactgtattttgcttcga

SEQ ID NO: 41 - DNA, 169260 bp, Homo sapiens
gcgggcggctccagacttcacaggcagcagctagcgaggcggtctcgcccggcgcgaggccggcgctgtgctcgcctcggagatcgctgctctttagctgggtgcagaaggcggctccgcggctcgcggacgactggctgggcgcgaatcagattggggggctttctcccggtcccctcccacctcgtctgggctcgcggcgtctccggggaaagccgtggccccgagggcggatccgaggtaagagccccttggcgaaaggcgccggtcccggggtccggcggctttgactttctcgattttaaaaatccgcctttgtgtgctggaatcggagcggtgccaggagccgcgtccgcctcccttcactttgactgctttcaactggtgttggcagccaggtgcggtagggcgctgcggccggaggcgtccgctcgccgggtccgggcaagctgtggggcccgtgcagacccgcgcccagggctccgggaggctgggcagggagggttcgccgtggcccagtgatattcatggtaacctgagcttccgcagatacacctgcgctcatctggtccgtggggcgactgcagaccgagtatcccgatctcggcttattacgttagacttgggatttgtgcgctgctctgccaacccgcctcaaatggggaggggttcttttcaaaatgaccctttagggcagggtcccacccccgtttaccccctcgaattaacatagctaattgtttcggaatcgttgtcaatgcctaatggctgttgactttcttagcttgctccactttactcaccattttacttttgggaagacagacggcctttctccggttgtggtcagttcatgcatttgaaaggggtttccccacccatgtactccctgccctctccgatgttctcactcttactttccttcctaggactacctgtttgcaaaatctttgcaccgaccgttctccggcagtgtttctcaaatcctcctcctcccatagggcccgtagtactgttggaatctcgcggggggcaggacgccgtggttaggatttgaaatccgcagacatctagagcggtgaaggattaggaattagaatcctcctttacaaaatatgtttcagtgaaatgtgttactgcttctcttttcaaggtttcttgccttagatagtaaggggaataggtaaaagagctaatatgttaggatgagttcaggtaaaacttgatttcagatgtgtgaagagtgtgactttttggctttgtcatttttgggaaataggagagttaggattccgggcaatcttctttatattgaaaaagcccctcaaagtaactgtgttgtgtattgcctctagtttattttcattgaaaggactccattcttccacagctccttgggttctggaaagtgagcactagtaatggacgtcatgtggtagtgagtctattggaattaaagtcaatgtcatcctgtctcacctagtatagattttttgtttgggatcgcagttttctaaacatattgctgtagttcttaagttgctggtgtggaaaatttttggtcacgaattcacacttttacttacaatttgacagttaaaacagtatagaattgtcacataaagggtaaggtagaatgtatcacaaatgcaatagtgataatataatgcctttattgcagaatacacagattgagactttgtaagattgcaccacaagtcattcactttatagcagaaaaaaaagaaggaaaatataatttgcttttaattctactattctgagataaccgctgtttacaagacttggtgcattctctttgtaatttttttcacttcccaatgtcattgaatattatatagtaatttccagtaagtgtaatttaacttatactgttagtagccccactcttaatagggtgatgtttcttttgtttcctgtcaggaacctaatgtctaattttgaatattttgcttgtttgtgatcaaacttaaagatttattttgtttttatttctagctttttcctgctttcaaggttttatcaatactgattcttttcagataccagttcttttctatgctatggcataggcttgctactctctactttgtgtttattacattccaaatcctagttattttcttacactctgtttcacaccctttaccctactgctttttattcttctctctactcccttcttttacatacctcttttaattctgcagcaggtcacttgaaccaaggtttgtataagaaaacatagtatccagaataggaaatgataggtttttaaaagttgtctctttaaatacttgaagttctattggatgaatattttaacactgatttatgtaatatttatatacaactcagctttcctgagttgtgtgaaacatacttggtagttacacggatcatcacaaaacaacataagttaatgataaggtacaaacttttggacatctgtagaggtatgtcgggggaaaaagtggaattttaattaaagtattctggctatagtaaatccctcctgggaattattaatactacatgaaattgtttgcagctgttagtgattgaaaatatttttgtaagaaaaattctgcattggaatagttgcaaacattttaagttgaatatatgcaagaaagtttaagggtcttcagtgcttcactacaaccttttcagtattttctagatgtattcctaaatgggatttaaaaaaatagaccttatttctcagaagttttggatttacaggaaagctacaaatacggtgtctatatacccccataccagcttcccctcttattaacatcttgtattattggtatttgttactattaatgaaccagtatcagtacattagtattaacaaagtttatactttatttagatttccttagtttttaatgtcctttttctgttccaggaccctaccatccaggacaccactaaatgtatttcctcgtaatgtctccctaggctcctcttggctgtgacagtttgttagacttccttgtttttgatgatgtttgaggagtactggtcaggtattttgtagaatacatttgcattggaattcatctaatgttttttctcatgattagactgtgattataggtttttggtagaaagatcacagaggtaacgtgccattttcatctcatatcaagggtatatactatcagtatgatttgtcactgtgatactcatctttatcacctggctgagatagtgtttatcagatttttccacttttctccacctttttcatgctgtgctcttagaaggaaggaactgtgtatagcctatacttaaggagtagagagttatgcttccccctttgatggtagaaatctatataaattatttggatatttttctccgtgggagatttgtctcttctcccccatgtatttatttactcaatcatatttattttgttctggactcatggatatatatatattatataaatataaaatctatctatctatctaaatattttgggttataatacaatgctactttgttacagcttgactccagtgcctctttgacatactaccatcaatgtgaattttgtttttttggaagcatttccttactttctggtattatgagatgctctaggttcatctgtatacatcttgccacagtcctagaatcagtcatttctccaaggaatctggatcattttgttggggaatggtgttagaaaccaagatctgggtgctaggtgtgcttgttgctactgtggtatcattgcttctaggttctctcatgtgacaaagcaagaaatacatgtgtgtatatgaacatatctgtacatatttttatgtaacagtttgtatccatgtttaactatgaatttacattttatctgtaatgctaattcattaccacaggtatcattctagccttctccctttgtttatatgtaaacttactccaacagtgagaagaaacctggtttgcaccatctgccatacatttgcttaatcattcatttctatcatagatgtatagcagcattggaattgttaacctgtgctcccatgggaaacaactttagcatcaagagtacagtgtttatgtactattccttttgcttttagtctcacagcttctactcatttctagagttagtcagctaagcacctttcctcctatccttttcagtgagattgtagcacacatttataatacagttagatttctttgttacaatctgcattccaccttgggattccttgaccttctaaatgatttgcttacgtttgcatacattaaagtttactctttgtcctgtgaagttctttgggttttgacaaatacttaatttgatgtagctatccttataggatcatagtatcataccgaataatttcaacacattacaaatcccctgggcttcactcataacctctgtgagcccctctcccagaaaaccacgtatctttttactgtctctttacttttgccttttccagatgttgtataattggaatcatacagccttgccagactggcttctttcatttagcaatacacatttaaggttcatccatgtcttcctgaggtttaatagctcatttctttctatcattatcagatatatcatggtttgtttattcacctattgaaggatattttggttgcttccagtttttggcaagtatgaacgaagctgctatgaatattcacatgcaggtttttgggtagacataagttcttatatccgttggataaatatctagaagtgcgattgctggatcctgtggtaagattatggttagctttgtaagaaattgccaaactgttttccgaagtggctgtactattacattctcaccagcaatgaatgtgagttcttattgccccacatctttgctagcatttgattttgtcagcttttttggattttacccattctagtaggtgtgtagtaatatgtcattgttactttaatttactatttcctaatgacatatgatgttaacatcttttcacataccccttttcatctgtacatcttctgtggtgtgatggctgttcagatcatttgcccactttttaatggggttgttttcttattgttgattttaagagttctttatacattttgtatacaggcactttatcagatatgtgttttgcaaatattttctcccagtttggtttgtctttttattttcctaacagtgtctttgtcagaacagatgtctttaattttaataaggccaacttaccaatttcatggataggcttttgtgttatatttgaaaactcattgccaaggctacatagattttatcctgtgtttttcctagaagttttatagttttgcattttacatttaggtatgtgatccatttagagttaatttttatgaaaggtataaggtctgtgtctagattaattttttttttgcatatggattcctagttgtaccagcacaagtaaatgtgatttttaaattaatagattataaattgcttagaattgaaaatgtttttattaaaatttttattacatgttctgcaaaattacttactgtaaacagttgagaaatgacttagaaaccaatatataatacagcatgtactgtgtgctgagatttatttctagacattgtacataattcattttcctcttttttttttttttttttttactaactcagagatgcttctttgtgaaaatggaattgttagtatagagtaacatctgtcagttcttttagatcttatcatagggaataatagtttgatttttcacaaaaaggatctggaataaaggatttgcagggtgtatgttgagaagaggcagttgatgtatgcaccagctagaaatctgagacttaactatgtggtcttgaatcttttcccatgctattcttcctgctacaagtgacttttttcaagtacagttgacccttcaatagtgcagcggttagactcactgacccctgcacagtcagaaatttttgtataatttttgacttcccaaaaacttaactagtaacccttctgttgactggaagccttactgataacacagtctgttaacacacattttgtatattatatgtatattacattgtattcttacaataaactacagaaaagaaaattttattaggaaaaccataagggagagaaaatccagtactgtattgtacttattgatattgtaagtttttgtttgcttaccagatgactcctctttctgaaaaggtgggggaatggaggggcagggctgggaactgcagctgcagacctcaatctatggtacataccaagcaattcaactttatctctcataatgtcatgacttttctctgtttcttgggagcatttctggcatctctagtggcacgttttcattcaaggtttatggtattgtaccaaacaggatgaaaaatacaagagaacaccaagaaatcattttttactgtgatacacaatttaccggagagatgaactgctcacgcagagatgattaacatcacacagtggactaagcggttactcacaacacttgagctcgctgcaataacaacaggaggtggctatgaaattattacagtagtacagtatgtactacagttaattgtatgcagttaggacttaatactgcatctttacatttgtttacatttctcttgaccgcgaatgatactatgtatcgtgtgtgtgtaagttttgataaattttaattttttctaataaattttatggttactaccataaaatgataaagtagactagtatttatatacatattatgcattcatgacatacctaacttttttcttaatgtttttgttatcctggctacgtggtttgtctgtgtttttattgtatttatttatttaaaaaaattttttgagacagagtctcactgtcacccaggctggagtgcagtggcgccatcttgggcctactgcagcctcaaccacccaggcccaggtgatcctccccattcagccttctgaatagctggaaccataggcatgtatcaccaggcctggctaatttatttttatttttattttttgcagagacaggatctctctgtgttgtccaggatggttttgaactcccaggcacaagcagttcttccaagttggcctcccaaagtgctggtattacaggcatgagccaccacacccagcccgagtgtttttaaattgtcacaaatctccaaaaatttttccaaatatatttattgaaaaaaatctgtgtataagtggacccatgtagttcaaacctggcttttcaaaagtcaaatgtacctctcttttggtatacattttgtgttattgatattgtgatgtactatagtttacatatttgtcctctccaaaactcatgttgaaatttcatcctcaatgtgagagtgttgagaggtgaggcctttaagaagtgattgatccattcatgaattaatggattaaggggttatcatgggagtgggactggtggctttgtaagaaaaggaagagagacttgagtgagcacatgagcacactcagcccccttgccctgtgatgctctctgttgtcctgggattcttggagagtccccaccagcaaggaggctcttagcagatgtagcccctcgaccatggacttcttaacctccataactgtaagacataaattccttttctttagaattacccatttcaggtattctgttataagcaacagaaaacagagtaggacaggattagaaatatttataatgttgcactaaagttagaaccagtagtcttcaagaagcaggtggagcagctcacataataatagtaccttttgtgtggcaggtgttacatacattatcttctttcactgttacaagagccctttaaggcatgcttctttatctcagaattacagataaaggaataggcccagaaagaaaaagtgacttgtgtcacacatggggagaaagggaccgaattgggatgagaaccctgacctgactccaaaatccatgccctttccacttggttgtgctgcccttattaaagaaaaagggcaaggatggccagagtgtccttaattacattcttttatttaatactgtgctatatacttgctcaaattactactgtgccaaacaagaatagcgaaaaagtttgtgtatttaagctccacaaagattcttctagctttgttttctgttgactcatctgtatcctactgaccagaggtatgtggtgatggaacacggttgttttaaagaatgaggatcttttaaaaagaaacatttgtggggaattagacaaaataaagcaaataatggtagcattagctagttatttctttctttccctcattgtatttaaagcttctcaagggcagggaactgagtcagttaagttccctgatgtatttaaggccaacatatgaccatatgtgtcagccatatgacacactcacaaaaggcttgctgaatgaaattagcacttattatcatatttttacataaatacttaaaagggcatgagttttcctcacataggaagttgagcattactacatttcatttgtttattcattcatcttttatcgagtgtttgttgagtatctgttctgtgccagacaccaggaatacaaagatgagtaagacaggatctctgccttttgttgtcagaaggctcagagaatggaggcagccagacacccgttttagtacagtgtggagctgaaggaagtatatattaaaaaacaaacaaacaatggactttggaatcagaccttatctgccttggttttcttatcaaagaggtggaaatgtcaagtaggtactattatccatggaggatgttaaatgaaaagtgtgtatgcctgtgtgtgtgtgtgtgtgtgtgtgtgtgtgtgtgtgtgtgtgtgtgtgtttatcccagcacatagcagaaaggagagcctcactgtggccgagggagtcagaaaagtctttactggggaaggtgatgtttgagtctcatagaatgaatttttgaggcaaagcgagacgctcatctctctccaggtagaaagatgagcatgtttgacatgtgcggaataggttggcatgatgggagtggtgggaaattctgcacattcccacattcagagcttacgggagtattagaaagaactgaatgagcagttatttttcatttttgtaagtaacaatacaatagagtattcattacattgtagcagaagagaataaagataccaaacctgtttaagaattgcataaatcttctcttctagtcacatggccttctaaatgtagctctttatgtagcaaacaaattcatgtgttctttttcagtcctgtgatactcaagtgattatatggaatttaagaaagagaacttgcatgtttttgggtgaaattggaggtcctgtttcaaaccattcttacatttagtagcatagcaacaaaagaatgtaataatctatgaagccagatctagtcctgtttaagcctgtctaaaattctaagccatagtttctgaacagaacctgaaacatactatttaggaatgtactaaaaaataacttgttaaatgaattatgtgcttgataagagatcagagttctataattgaaaaattgtgtttttaatataaggggagaagaaaaagagaaagaaaaaatagtgagaaaaaagattgatagaaggaagagaagtttgtacttaaatgagggagaaacatttttcaagtcccttattgagggctgttgaattatcttctgttaacaccattagaatattactaagttattccttattatagaaatacatgtatattattgagatatttgttggtttaatgcaacaatagaatgtttccagtatctgaagtggaaaaacaaagctgcaaataaaaatatgtgtaaaatctgtctcttttgagaagacattgattacagtttatctaattttctgcaataattttgacatttaaagttgatggtaattttagacctgaatgtacaataagatgattttaagtgctcttttagaatttaaagaaagatatacttttgatgatagagatagaagatacttttaactgctttgctagtgaaaagtctgttacattttgctgggcaaggtggctcacgcctgtaatcccagcattttgggaagccgaggcaggcggatcacctgagtttgggagttcgagaccagcctgacaaacatagagacgccctgtctctactaaaaatacaaaattagccgggcttggaggcacatacctgtaatcccagctactcgggaggctgaggcaggagaattgcttgaacccgggaggcaggaggttgtggtgagccaagatggcgccattgcactccagcctgggcaacaagagtgaaactccatctcaaaaagaaagaaagaaagaaagaaaaagtctgttacattttaaaatcttggtttgccttcttttttggggacttggatttcttgaaattaattttgtgagtaacttggtaaattgatgacttattttctgcctgggcatgcaaactctgcatttgatagtttctttcatatatggaagaaatgaaaacactacctttaagtagatttactacctttattccccccataaaggcatgaacagcttgtttatgtttatatgcatgcgtacataatctccaatttctctttgcagtgtgttttcaaaacttcaactgttttatgacaaactatatgtgtttgggagtttacaaatattattctttaatccaggaatgtgaatttttgaaaccctatcttcagattgagttgtccttactgttttagtgtttatctgtattctcagaacctctgttgcgtggtctgttttcaaaaaagtactgtgtaccataaactacagtgtttttgttttgttttttgcacatcaagatccttttagtcgagagaacattaattttgtcagtagttcttttatttagctcctttgtggggccttgttagattctgaataatttaatagcaatggaatcctttctgtgataaaaatctggtcattggtccaatacttgtagcattattcacatgatactcatgcatgcaaaggtgtgggattaatgcgtatgcctgaagagtgtgtgtcagagtgtttttaatcattgttgaaaatcaccctctgaagattttcgtgtgcattaattctcagatttgcttaaagtattatcacttctattttaaaatgaataatccatggtggcctagcctgaacaataatatgtaagaaaaattggaaaaattataacttcctttaaatttaggaataaggtctatattttttgtatatttgtatgtttgctatgtttgcagaattacagaataaattgtttaaagcatatttctttctatgttattttaatttttttacatttcttacccaaactgttgaaacaaaaagtttcagtcccagttagtacaacatccataaactttgtccacatttcacattttcagctttatcttaagactggctactttccatggtcttgtcaagaaaatagtcttttacaactcttgaagcagataaataaccatgtgggctttccttcatcaccccctttcccaactcttttcctcctcccagctgttccccctccttttgctcgtttctgacaccctttttcaatcctcagatggctttaatagaaaagtatatttttcataactttgatagctttccaattactattctaactctttctcactgcctggtgagatctcagtcatggagagagaagtctgaataaaagagacattcatagtggttatgacagtgaaggttaagtttaggctgctagggggtttgaaacaaaggagggattgaagccttcatcgcctttaccttatttgggtactaagtaagtgattttggaaatagtaaaatctcattatgaaaagagtgaaatctagtccggaataaatgtgttaacagtgcttaactttaactggaatgcatcttaacaccattcagtttttatactgattagaaaggtccactgtggttttggtcatatattagaacatatgctgttggttttttgttttgttttgtgtgtgtgtgtgtgttttttttcattctgctttgtaagtaccccttatcactgtagggaattttagaatttgaattaaaatatatcttgagttatataatgtaaaaaaaaaatttatataggctactccatggcattgtaaagaatcttaaaatagatataaaagtgacttcatcttacctccaatgtccttcctccatctatatctgttatctctagctattttcatcttttctctctgccaggcagttagtagaatagttgaagaatgattttatcagctctcattggactacaggataaaagacctaaaaatatgggataatttaatccaatggctagcaaatacattttgtgttatgtttatggttttcaaaggcattgataaaatcaaactatcattactgggaaatatgaaattttcaataagattccaaactaatagataaagtgataaaatgattgggaaaacaagtggtggtagaatctgatataaaaatagtttggcggtagcaaaaggggaaacgctaaaattctcaagaacccatcagccatttttactaacactgtgctcttcataagctatatctagggaactttgattatatgctgtaaggaacaatatattatttaagtgtatattgaataagtattcaataaataactgcaaaataaaagacagttctgaatgtggaaattcctattcttgcgagattgagccagacatttctagctaacattgacgttattgggctaacgtgggcatcatttgggttttgggtattaggtgtaacaaatgcttgctgatgcatagaggccaatctaggtctgtgttagttcctgagagtgtgcatgtgaacttgaggggaaggtttttagagtaggtcactcacctaagccagctgtttttttctctcttccaaaagagtaccggattgctcctttgcaggggctgacttgagaacatggcttaacttttaaggctagataaactagttcagccagaagtgtattatttccccccaaaattacatttaaaagcttctagctatgatcatttcagctgcttcttcctccctttctaattattcttgctatttctgttactgatatcaaccataccaatcactggaaaggagaatacttgggcaaaaatttcttttaaaagaaaaattgctggagagaaatatgtacacaaatttatattgaatatataataaaatacatatggaactgccctttgtatgtgaaggtgagttttgtttgttgtagtggtgtcagatctggtttgattcatttcagctttttccagtgttctttcttgtgatacgcatatatgagataggaattttgctaaatcattagcaggcccattggcttaatgtaacccaatctagtttcttgatctaacagtcctggaatatacaactttacctaatagaaaataattttgtttcagttaatgaaatttatctgtcaataaagaaatattaaataagtgcctattaagtgctagtactaaataatgagaatactctaattgacaagatagacaacattcttatccttgtggactgcgtgatgttagacacctaaatgaaaagaagcataaaaacttaacagaagcatcaggttctaggtaagggctcaaaaatctggaaaataaaggctaatcttttttgcttttctcgccctctttccttaatatagattcacattttttcctattcaaatgtaatgatattcacattttgtattgtttttctacatatactggtactgtggatttataaaataagtctatttccaaattacatgtattttacaatgattccacaaaggaacgttggctatttatgagctttggggaaaattacagtatatcagtactccctttgaaagattttaaactattaaggtcaatttaagatcagaccagacaagtgtggtttgtgtcatttttatatacggtattcagtattttttcctgcaagcttttgggagtgaagaagccattattcataaaatgaattcatatgtaacaccttaggctgatcgtaaagtgttaaaccttagagatggggaaaattctattgtcttgaattttgaatgtgggtaactttaagactgccatatgaattgccaagttgcaaaattgtttttgcatttcacttgcaagcaaggaaaatgtggactccttctttagtggggccaagcgcattctaacacacctctcaaattacacaccactgaaatgatactcacaatgggtttggctcatatgtttctagttagctactatgaatgaaagattcataactatctgtttcaaaaaacttccttatttgcactgcagggagcttaattgtttggtagcagggtcaagaattgcttttaaatactaagcatgcatggattgggccattatacactgaactaaaaaaaagatttctgtgcacaaagaaggctttagataaatatttgtcaaatcattgattactttgttggctgtggaagaataaaagtccctgagttttcccaccctgttggtaatttggaccaaatattttggtcactattttttatatatatatatatttatatatttatatgtttaaaatatatatatgtgtgtatatatattttatatgtatgtatgtatatttatatttatatatgtatatatattttatatgtgtacatatatatttatatgtgtatatatatatatatgtatatgtataacaaacctgtaacctttcccttaccttgcctattgagcattgtagaatacaggataacagggaggaagaagtcattcatacttactagacagatggttggcgtccctgtggcaaccttgtgatctaataattttccaagttctgtctacctaactgaagagtaatagctgtttactgtttgcttaaataacactaggcctgtatgcaagttgcagggggggtggggtgaaggaggggggtagatatataaattcatctctgcagttttatcaaatctgtaaaagaggtgtagcatacaggcacctcttttccaaaagaaaaaattcattagttcctcattttggttattccttcttattcgtggctcaagcaaaccattaccagagaatcttttttttttaattgatgacacgctaaaaattagttatttttgaagaatttttttcaaaggtagtatttgaatatattggtaaaagatggtggaattattttcctgcttttctgcagtaaattagtttgtacacttctggtgacatttgctcgactatccaaagaagatgaggctgttaaagaaattttaacaaatatttatgaatgcatgaaattgattatgtttattaaagtcacaaaaaatttctagcctttattataaattttataaattgctactgcaaaaatgagagagaattatagttaccaatgtgaattacttttgtttggtcagacattgacttcccctgattgccaccttgtcactctgtttactagacacagataggaacttctttcttcttcctatgatatgcatttgattcatgtcatatgctgtcaaaataatgttgtcctgagattatttgctggaatgataaaactgatgcagactatgtcagctagacttgttaatatcacattattctttctaataagtacttgtacttagaatacttacttgcttctgctgcatcatgtctctcttcttatccccaatgctttttttttttcttaaatctctctccatagtctcttgaaggggctgataaacacagttctaaaatatttcatgtatctatctccctttaacacataatttggtcctgtgcatatgtttaataccagggtatccccattcatttcctccttcttctgaggatgattgaaattttgtggcttcatgattgccttctaattttcaacttgacttaaaccagagcatagtaaaagaaccattaataatcacaattaataacattagaatgtaattttaataattcaggcctctattgcaaaatgtattatggagtcagtttaaaatgtgattcttctctctcttatatgtacctatgtccaagtgtgtatatagtaagctcttggagttcaggtgtgtcttggtgaggtattctgcatatatggaacatagtctcttaacatccttttgctgctgccttatttctgtcttgtttccacctaagattcttgaagagaagcttaatgtctatggtttcctcttcacttctcctacatcagcgagcccactgtggtctgatgctgagcttatgtctgtaggtcatctgccatcttctaaaagctaaaccaaaaggaaaatgtttagtttttacttgattttgctgtagcatttacctgtaaactctttgaggacataaactgtgtctcgttcactatgaatttttaccatttagggtttctggtactttgtagacccgtctatttgctgaatgaatgtatgtttgtaatgatttttgccttcttttaaataaaaagaatattctcttcctttggctcctgtggtggtgctgttctttcctggttaacatctacctctgctttgttacccatctacacttagatgttgattcagaagctctgctacttgggatggaataggtatccaaaattcttcctaagtgaaactctcaagtaagttctagcaccatctgttggcagcagtgagagccaatgctttatttatttatttatttattttgtgcctcagttcatggttttgtgtattctcagaacactcacaagttgaaaagtttctggattttctggaattattttcttagccttcatctcatttcatgttacagcctaagtttcattctctttctagggaacctcagtgtttcgtttagaacagttactctcagttcttcaggtgatgcctttcttgggaactctaactctatttatgactgaagctgaatatcacacaggcccctcagacttcacatttcccaaaattaatttcttgcttttactctggccccctcatctctttctgtctctctacttggagtgacttttatccaaatgacaaccttagaaatctgaatttttcctggactctttttcttacccacctttctgccccacctatatgtcaacagtcattaaatctttttgagtcagcaaatggctgatagagcactctcctcttccgtctctcactgctaatcatgttaactaccttgcttaaaactcttcagtggttccccatatgctcattagggtggtacaaatgaagactacgggcgcccgccactatgccctgctaattttttgtatttttagtagagacggggtttcaccgcattagccaggatggtctcgatctcctgacctcgtgatccacccacctcggcctcccaaagtgctgtgattacaggcatgagccaccgcccccggccttcccctttcttttgtattgaaattagctctcaatactgccacaaagaattctttgtaatgagttagccacaaaaatagttcagttctaggaagaatttcttttctttttcttttctttttttttttaagagacagtcttgttctgttacccaggctggagtgcagtgcaatcctacggagaatttctagcccattagaagaacacatccatgaccccccttctcctttacctgccatatgcaactgattgccagattttgctgctttcacattaaagttaaccctcgcctttgccccttctgttcagtttttcactgtttcaaggctatatgaccattttcttaagctattccctcctgaatgtctctgtatctgcctctgtcctacttcaattcatgttaattactactttcagatcagtcttgctaaagctgagttcagatgatgtcagtccattgctttaaaaactgctaacaaaggtttccttttcaggcttttcacaacctggtgactttctttaattttagcctcactacccgctttcctataaattactcattagccaaagtgaggtactatacactttcatctgtatacttcagttttcccagtctgtgcttcagtgtccctcttgtctatatttggaataactttttaatttatctctatatacaaatcgaatccatcagttaaggtctactttatctgccattgtagaataatctaccttctttggtacctctcccacttaatattttttttctcaggatcgcctaggcacttattttctttcgtgaactgtaatttatatacatgtgtgttacctgataccaggtatcaagctcctctaaggtaggctccatatctgatttttacttttggacaggccttaaagcctggagtggtgcttttgtgtgatagacgctcaatgtgtattggttaaatgatgaaataaatgaattttttcttgcatctttcatcatgagatttgtgccagtaacatcccaactctcaatatgaaaaggaaaaaaatactgaccacagtttttactgagcctaaattgaaatattctgaaaaagcttaatcatggtgacaatcagaatgtactctgttatttaggataaacccttctggcaaacatgcctgtttttcaggttcccattcttttaaatgtgggctatgattatgctctttaacatctcacagatttaataagtaaaccattgttttaaagtattataactttttccacaaaaaactgagctcttagaataaaaagccaacaaagatgatattttttcagtctgactcttttctatcctttcccctcattagagcacaattttcaagatttttgtattatgagtaagacagtgagagctttttgatatttcatgaactaaacccaaaagggcctacaaaaacacgctttagcacattgtttttaccaaatcctactgtaattataaatatttttaatagtatgaataatgttattttttcccttcctttctttttccctttcccttcttcttcttttttttttttttttgagacagggtctcgctctgtcatgcaggctggagtgcagtggtgtgatcatagctcactgcagcctcgagctcctaggctcaagtgatccttaagtcatgggtgggtggatcacttgagtccaggagtttgagaccaatgtgggcaacatgacaaaaccctatctctacaaaaaatacagaaattagccatggtggcatgtgcctgtagtcccagctacttgagaggctgatatgagaggattacttgagcctgggagtttgaggctgcaatgagccaagatcatgccactacactgcagcatgggtgaaagagcgagaccctagtctcaaaaaagaaaaaaaaaaacctaattaaaaaaacatgaaaattacaaataattgtggcactggaactattttgggtattattcaactgctaagaataaaatcagcataactgcagaatacatctgagaaataataaaacatgactttggtcagaaagttcaggaaatttttgtactgtgtccaatttattttgctctgtgatcagattctcgtgaatgctagtgttagacaaaagactgaaaatagagttactatatagagatgttcattgtttggggagaaattcaatagagtcttgaatattctcgtgatgtgcagaataattatatagagattattttaaatcataaatacatcttatatcttaacatcttaaatgttttgctttccagatatactcaagatatttctgtgaaaatgttttttcttaatatttgccaacaagagcgtcttatatttgtgtaatttttccaaagttgagtaataactgtaatgctagtttgcttatttttcataaaactctgagtgattttctttaatatatccttgaaaatgcatttttcatttattttttcttattcttgttgtatgtatatatcaagtgtggcatttattttgagagtcttgataaaattggcaaaagtagagttacaattttatgttaataatgaaagaatgacatataatatttgcctgattgtatctcttattttttgtgtgctttttgttaagcatatgtcaatttattttgccaacattattctatagacagagaactcctgtttttttctttcaggttagttcatgtgatcctggttaatggaacataaagtgagattttatgggtgacagggagagagatgaggcttgacttgggggcatatgggaaaagaagggggctgtctgttcacaaagatttaaatatctgataagaactgtttgccagcgcaattatgaataagtgtatttgtgcctaatttttattttttaaaagctcaggtgattataatttcatctgtaaaatgttgaaagtatagtctgattaaaataatatataagaaatggttttggttctttttgaatcaaaaggtgtgtaaacctggagaatctgcagagtgccagacctctgcttttgtcttttcttagtattgtatcatgttttccttgatattaatcttaagatgacttcatatatgtcaatattgtttaatgttagccatccacctatttgggataggaaaaaaagtttttccctgtgtagatttgtgtggattgccgaatcactactatgttggagggagattattttgcttgagagtaatattgaaaaagctcctattttctcccttcaaaaaaactggcttctgaaaattccgtgacttaatgtatcaagaacccaactcctcaagtgatgttcttattaattaatatttagtaaatactacacacccaacttagggtaatttgttggggaacttatctcactacctctgctcttaaaattcttttttttttttttttttttttttttgagatggagtctcttgcaggctagagtgcagtggcgtaatctcagctcactgcaacctctgcctcttggtttcaagtgactctcctgcctcagcctctcgagtagctgggattacaggtgcccgccaccacgcccggctaatttttgtatttttagtagagaaagggtttcaccatatcggccaggctggtcttgaactcctgacctcgtgatccacccgccttggcctcccaaagtgctgggattacaaacgtgagccaccgtgcccagccttaaaattcttaaatctcatttccctccttttattattattcaatagttaactgtataagccagaacagtttttttaaaaattggatatctcccagatttcttccaactctaatattctgtaagtctttggtttttacttaggttaattcttaactgcaatggaagaaaagcataattccagtttctaaggtaatacttaacatttctttacattattctaaattgaatggaaaactttatttgtaaaataacaaccaaaaatatctattttattctctggggaaagacaactttgtaatatatttttccacttgaaatgtttttgctttgcaaaatcctgttgggaaaacagatttccagacagcttaaaactgacaaatgagtattttgacaggtattcctggaaggagagctgttgccaccaaccatttcaatttccttattctaacaaccatgtttagcagagaagaagacatatctcagtttgaaacaaatatttagtgttgagagaggtgggtgaatataagccttttttaatgtattggaaaaatagggcatttagttcactgttttggaaaatagagtaacaatgaggataataaagtacttctttatggcctaagactgacctgatactgtcaacttcctgtgttccattcagtagggtgttcctagaggagggtttcattttatgccactgtgtcatttaacggcttttttctgtgtgcaacctgttgtggctttagaatagaaagcgtcaagataaaacatttcatagcagaaacatttttctgcataaaattccactggtgaacagtagttactagaccttagtagaactagtctgcttctgtagaaataatttgtgaaaatggtagggatgaactctgttgttctgtccatatttaatttaccttccaatttgtaaacttcttattaacattgatatattttgaacaatattatttagatttccttcaccatacagttattttttgagtagaatattagaagtagtcatgcaatctcttgttcttaggtgctatttgccaggcccacacacattgttagttgctgtcattatttgtctccatcatcattctcaccaccaccatcatcattgtcatcatatatatatatttaaacatcagagatggctatttgactggcttgtggaatttgtgaaaagcataaatctgagaatcttaaaatgtgagacctgctgtttaaagatagagcaaatgtagttatggatacttatagaatttagactaattccttttggtagtaatgactgagtgattttggcttatttcaaagaatcgagttagacatatgtttgaatgaccccatagagtcttactttatatgcttaagcctggatgaaaatcaatttcatttagctttaactcggataagggtttcatggtcattattatattctttttttcttaaaactttccttttttttttttttggagacagagtttcactcttgttgcccaggctggagtgcaatggcacgatctctgctcactgcaacctctgcctcctgggttcaggcaattctcctgcctcagcctcccaagtagctgggattacaggagccccacattagctcccaatgtccagctaatattttgtatttttttttttttttgagatggagtctcgctctgtcaccaggctggagtgcagtggcgcaatctcggctcggctcactgcaaccttcgcctcctgggttcaagtgattctcctgccttagcctcccaagtagctgggactacaggtgcccaccaccaggcccagctattttttatttgtatttttttgtattttttagtagagacggggtttcaccatgttggccaggatggtctgaaactcctgacctcaggtgatccacccgcctcgacctcccagagtgctgggattacaggtgtgagccactgcgccaggccaaaacttcctttctttctttctttttttaaacactaaaacaaactgctgaagagtattttttttctctgttaaaacttttaggccggttgcaggtggctcacgcctataatcccagcactttgggaggccgaggcaggcggatcatcaggtcaggagtttgagaccagcctgaccaacatggtgaaaccctgtctctactaaaaatacaaaaacattagctgggtatggtggcacgcgcctgtaatcccagctactcaggaggctgaggcaggagaatcgcttgaacctgggaggcagaggttgcagtgagccgagattgcgccactgtactccagcctgggcgacagagcaagactccgtctcaaaaaaaaaaaaaaccaaaaaaaaaaaaccacttttctccaaaagtagatatgtgtcaaaaaccaaaatactgttgccttttacaagacttttgtaattcctttaactccctgcagacattttgaaaatcacttctttgtaacactaatttactacagtttacttttctgaagaaatctctctccagtttctgttggccattttttatttagttcttctctacccccaataatttcagtatctcattttcttttaataattaaaacaatttttttttcttactgaaagctactgaagggtacagtttcttgatcctttcttctctctttctgggtgcatctgttattgtttttttcctgtatttatttatttttgccctcagcaagggactatttttcaaactctttaacatctgattgctgtaagatctgttggagtagcatgtaaaagtcaccagttgatatgggtagaaatacaagtatggaattgtgcacccatgacccttggtagtatttatacatgagacttttacttgtagtctacagtttattgtattcaaataacttataaagtgaaggaatcactactaggcatcactttttgggataaaggcttattttgtttcatttaggtacttttttcaggttcttttgttaaagtctgcctggtgtgagttttgatttgcaaactgaaaaagctttaaaatgctaaaaattggctctgctcctttttgtttggatttctctgggaattctaagttggctatgacctcataacttcaagggcttctaaggtcaattataacctgatagatatcattaaacaaggattaatctcagtttatagaaaaattctgactttcaatataaaataattcaatggaaaatgattaatggtcttctgtttttggagagtgatattgtacttgacattgataatgtttagttttaatggttgtagatactacttgtttttttattgaattacttgtattagatcttcattccccagaaagtatgagacctgatgttcttatctcaagatgagagcttaaaggaagaagaggtcaaggttttatttaaattgtcttagctgaacctttccctttccctaagatctagcacctcagaattgctgacgtcagacatagttattgactgaaaagagttaaattgataaagtataatttctggcttcagaggttcagacattactttatctggttgaagtttcatcaagccctgaaaataaaatctttaggttgtatagtcatagatttagagagagaaaagttcttcaaaggcctgttggttttacagtttacataaaatcagtcctcggttctggtaacctttgtctgatattttgcctctctcctgctgatcctggaatatttcttaatttgcctggaaccttgtggacttgaacagattgtctcttgacttgtcattcagctccttctaacttgactgattgatatggtttcactgtgtccccacccaaagctcatcttgaattgtagcttgcataattcccatgtgtcatgagagggacccggtgggaggtaactgaatcatgggggtgggtctttcccgtggtgctgttcttgtgacagtgaataagtctcacgagatctgatggttttataaaggggagttcccctgcatatgctctcttgcctgctaccatgtaagatgttactttgctcctccttcacctttggacatgattatgaggcctccctagccatgtggaactgtgagtccattaaacctcttttcctttataaattagtctcaggtatgtctattattagtgtgagaatatactaatacactgatagaatatttttcaaattccagctttgtgtgaataccatgccgaatattgttgtgaatgaaaaactagtcatagttttcataatagcaagaaatctacttgagaggtaattaatttttgtatacctttgtaaaaaagtatggggacataaataggggtagaggcattggattatgtatgttctgtgtgtgaaatcattctggaatttgtgattttgatgtctagagtacaacactggctatggtatgggaaggctacataaaaatttcataaacaggatggagaaagaagagtgccatgcagcgtgtgcatatatagccttgggagtttagtttttttctaattttatcatctagatgagagcagcatacttttctttataaatactgtttaaagttgagaatctctgagtcttttccattaaggaacagaggccccttgttgtgaagctggcacagtcactggtgcaggatggtaaattgccttgctgtcaactctcctctgcctcttattttgttgcctcaaacatacattgttggaagactaaggcaatgatcaggctctttctgtgttctctgattagtgtactttctccatttattttggaattgacccacatgtgccatcttttagggttgttgaatattgtattccttatttcattgccttgctttgcatttttatttattttttaccaacttggaaagtttaatgtttgaacccagtcagatatcactattaagcattagcatacacactcattttccctcctatccaggtatgattatagtctgtcttaggaaaaaaaacaacaacaagcaactcctatctattttaaaatataagcctgtatgagtaatactaactgtaatcttttatttaatgttttctttttaaattatgtatttttgctttttgtgggtatataaaaggtgtatatgtttatgggggtacatgagatgttttgatacaggcatgtaacacataataatcacatcatggaaaatgggctatctattcctcaagcatttaccctttgtgttacaaacaatccaattatactattttagctattttaaaaatagctgtaaccactatgcagaatagtacaattaaattattattgactatagtcaccctgttgtgctatcaaatactaggtcttattctttttaactattttttaatactcattaaccatatccccacttcaccttcccagcctctggtaaccatccttctatactctctctccatgagttcaattgtttttatttctagattctgcaaataaatgagaacatatgatgtttttctgtgcctggcttatttcacttaacgtaatgacttccagttccacctgtattgttgcaaatgacaggattcattttatgaatagtactccattgtgtataagtaccacatttactttatccattcatctgttgatggacacttaggttgcttccaaatcttggtgattgtaaacagtgctgcaacaaatatgggagtgcagatatccctttgatatactgatttcctttcttttgggtctatacctagcagcgcgattgctggatcataatgtagctctccttttagttttttgaggcaccgccaaactgttctgcatagcggttgcagtaatttacatcgccaccaacagtgtatgagggttcccttttctctacatccttgtcggcatttgttattgtctgtcttttggataaaagccatcttaactagcatgagatgatatcttattgtagttttaatttgcatttctctgatgatcagtgatgttgagcaccttttcgtatgcctgtttgccatttgtatgtcttcctttgagaaatttctattcaaatattttgcccattttttgaatggattattagatgttttcttgtagagttgtttgagctctatatatattctgattattaatctcttttcagatggatagtttgcaaatatattttctctgattctgtgggttgtctcttcactttgttgtttcatttgctattcagaaggtttttaacttgatatgatcccatttgtcccttttcgttttggttgcctgttctcgtgaggtattactcaagaaattttcacctagttcagtgtcctggagagtttccccaatgttttcttgtagtagtttcatagtttgaggtcttagattgaagtctttaatctatttagctttgatttttggatgtggcgagagataggggtctagtttccttcttctggatatggatatccagttttcccagcgccatttattgaagagtctgtcttttccccagtgtatgttcttggcacctttgttgaaaatgagtcgactgtagatgtgtggatttgtttctgggttctctattcttttctattggtctatgtgtctgtttttattccagttccatgcctttttggttactatagctccatagtataatttgaaatcaggtaatgtgattcttccagttttgttctttttgattaggatagctttgggtatactgggtcttttgtgggtccatataaattttaggattgttttttctatttctgtgaagaatgtcatggatattttgacagggatttcattgaatctgtagattgctttgggaagtatggaaattttaacaatattgattctttcaatccatgaacatagaatattttccattttttggtgtcctcttgaatttctttcatcagtgttttatagttttcatgatagagattcttcacttctttagttaattcctaggtatttaattttatgtgtggctgttgtaaatgggattactttttttttctttttcagattgttgtctgttggcatgtagaaatgctactgatttttgtaatttgattatatatactgcaactttaatgaatttatcagttttaatagtttttgatgtggtgtctttaggtttttccaaatataagatcatatcatctgcagacaaggataatttgggtttttcttttccaatttggatgccctttctttctttctcttgtctgattgctctagctaggagtactgcattgaataataatggtgaaagtgggcatacttcctgtgtgccagatcttagaggaaaggcttatcaggttttccccattcaatatgatactagttgtgggactgtcatatatggcttttattatgttaaggtatattctttctgttcccagctttttgagggtttttatcatgaagggatgttaaatttaatcaaatgcatttttggcatcaattgatatgattatatggtttttgtccttcattctgttgatgggatgtgtcacattgatggatttgtttatgttgaaccattcttgtattggtgggatttatcccacctggttatgatgaatgatcttttaaaggtattattgaattcggtttgctggtatttgtttgaggatttgtgcatcaatatttattggagatatggctcatagtttccctttttggtatgtctttggttctgttatcagggtaatactgggcttatagaatgagtttggaagtattaccctctcctctatgttttcagaatagtttgagtaggattcgtattaattcttctttaaatgttttgtagaatttagcagtgaagccattgggtcttgggcttttattttactgggagattttttattacaccttcaattttattacttatttttggtctgttcaggttttggatttcttcatagttcaatcttagtaggttgtgtgtgtctaggaatttgtccatttcttctagattttccagtttattggcatatagttgctcttagtagccactaatgatcctttgaatttctgtggtatcagctgtaatgtctactttttcatctctgattttatttacttagatctttctttctttcttagtatggctaaaggttcatcaattttgtttatttagaaaaccaacttttagtttcattgattttttttatattttcttctttttaatttctcttatttctgctctgatctttatcatttccttttttctatgaattttgggtttggtttgctcttgcttttctagttctttaagatgcattgttgggttatttgaagtttttcttcttttttgatgtaggcacttatagctataaactttcctgttagtactgcttttgctgtttcacataggttttggtatgttgtgtttccattatcatttgtttcaagaaattcttcaatttccttcttagtttcttcattgacccagtggtcattcgtgagcatattgtttaatttccttgtactagtatattttccaaaatttctcttgttattgatttctagttttattcctttgtggtcagggaagatgcttgatactatttcaagttttctgaatgtttagacacttgttttgtgacctaacatatggtctatctgtaaccataattttataatgaaaacacaattggaattctgtttttcctactgaagtttaagagactgaagactttttagtgtataaaggtttaatttgtcagtgctagtatctttcttaatggataaatattaaatacagtagatggtcattataatttttttattgcataaaattagttgtgttgaatcagatcaaaattatggaagtatagctaattgttgccttcaaagcataatatacatttatttggcaagaaactattcagcttcccaattgaattaatagatgttccttttaaaattagtcagttaatcaaaacatgttttttgaggcatttttagtgtattatagcactctgttggcaattatgaaatccaaaagaaaacataggggatataacaataccatattatgaaatattaacacataagctaattttgataatatggtttatataagaagtattggagaagggagaaagtttaattcccctgcatcttttaattaaaaaattttaaaaaaaaatctgtagaagaatccagaatccaggctggagtgcattgaatagtacagtgaacatatatgcttcctccccattcactgattattagcattttacagtatttgaatgtgttcttccctgcccccttgtatacatgtatgtatatttccctgcctccaaccatttgttagtaggccgcagacattaaggcacttcatcactgattatatatctcctaagaacaaggacattctcctacataaccactatatcactttcatactgaaaaaatttagcactcattgaatattatcagctatacagtctattttcaaatttctgcaatcatatgaaaattgccttcatagctcttttgtttgtttaagctaggatctaatcaaggccaatgtgttgcgtttagttatcttgtctctgacaggccttctttaatctgtaccagtgctgtacagtatggtagccactagccacatgtgaaattgaaattgattaaactttaattcagttccttacataccagcaacatttcaagtgctcaatggtcatatgtggctaatggatactctgttgaacagcacgaccatggaaagttctattggagagatctggaatgtaccccacctctttttgtctttgtgaaattgattttttggagttcaggccagttgtcttgttgaatgttctacgttatagatttgtcttgtttcttcatgattagattcaggttgtggcagattgtatctttcaaaactagctacactaagatacttggcctatctcacatcctttttaaaaatgtgactgacattcctgcagctgagaggtggggtctttgctctccttggatgtggacaagggcatgtgactgacaggtgaccaatgaagtaaggtagaagtcatgctatgtgacttaagactggctcactctttcctggtatgctggcactggggacttagtcatcacactgtgaggaagcctaggcggtgtgaagatgttacacaactccagctaaggtctcaagctgacagtgaataggccttcagatgattccaaccgctggcttttgagttttccagttgagtaggcatgaggagcagatagctgttccagctgagatctgtcagaattcttgatgcaaagaaactgtgagagctagtaccttacgctattgttcttctaagctgctaagttttgaggaatttattacagagcagtaaataactaatgcacaggttaaacagtattacaagagtactgcataaatgatggtctgcatttcctgttgcatcacattagggggcatgtaatgtcagtgtgacttgttactgatgaggcttgatcacttaagtggtggccacttcatctttttctttttctttttcttttttttttcttcagacggagtctcgctctgttgccaggctggagtgcagtggcgcgatctcaactcactgcaacttctggctcctgggttcaagcgattctcctgcctcagcctcctgagcaactgggattacaggcatgcgccaccacgcctagctaatttttgtattttttagtagagatgaggtttcaccgtgttggccaggatggtctcgatctcctgactttgtgatctgcccacctcagcctcccaaagttctgggattccaggtgtgagccactgtgcctggcccatctcttcatcttaaataaatacctttacctctttgttattaatatgcaatctgaaggaaagtttaattttggatagaatcagcttccaccaagtttcttgtcaagaacatttcactctacaccactgttttgagggtatttaaaatggtaacaattttagaaatcattttattcagtctctccattttgtagcttgatttaataaatatttctaggtttctattacagttactagggacataaaatttatgagatatgatcattatccacttggagcttatggatgaaaactaacatgaatggcatttaaggggtgtagattgggtaatacttaatttgtatttcaagatgattcaactgaaaggtttttattttccaaaagactaaaatgatgttattatgatgactgtagactctagtctcccaaggctggtcaatgctgttttctgaattattttcttatcacacagaattaaaagaaaacacattttaagtgcactcttatgttagacgttctgttagtcctgtagtttaggggtttgactgtatctttttctgaagatagaaatatatgtgttttaaaatatagatctgtcatgttccaaatttcttcctacgtaaataagaaatagtgagctaaatgaatgtctgtgaagtgaaggctgtcaggatactgttgtatgatttttgaaaaaatataaggtacaatgtattaacgaagtatgctagtatctaatatattgtcctaaatagttgttgattgggtaaattctatatagatgaaccatgctttttaatactggttgcatgcttatgaaaaaaagtggatcaaaggtaactatatagagcctttaaagtttttctgccaatatgaaaccatagttttcttattgtgtttgtttatttggttctgatataagaataattaagaaatacatttttcatttgtttttggtttgatactggcaaatttacttatatttttctgtcccaaattctatttgaatttcttggtagaacatataattgaagacaaagaagaaatatgtccatttatttcattgttatctctttctggtagaaccctgttgtctagactactttgctaatgtggtcagactcatgatacttaatttctttgtaggctctacagtttcacctgttacttgctgctagactgaatatttagcaacattttttcctaagtaactggctacaggaaaaactccataaatgattgaataaatcaatcaacagtttagtaagttaagtcagactacaactgttgccaagtaaaatggtgttatatctttatacagagggaagatgtgattagagctgcttcagaattataggaagatataagagtaatcctatctaggtggggaaggagcaatcaaaatacaaatcagttctggaaagtgtacaattctgagaggcaagttgcgataggaagctctgtatgtttaactctgggagggtgagataaaggtgaaagaatatagaattatttaagaaatggagcaaaactacagagtaaagagttaatgtagggacaggaaggaatcattgggggaagacttttgaatggcagcagacaggaagggacgagggtggagagaaagctaaatttttgagtggaggtgtgggtttgggtacttaggataaagagaccagtttaaggatttgccgaggagggaacccatagaaagagatcactgcttcaggtggttccaagatgaatactttctttttttggatacatttagtgctttacatttgctttttgtgctaaatcctttactaagtttatcatttcatgcaatacctgcaacaacccagtgacaacatctttattttacatatgaaagaaacaggctcagagagattgctcgaaaatcagtggtccttctgagatgtcagaagctcatcttggtgggaaagggggaaagccagagtttcaggagttcagcttaccttgccccttttctcctccaacaacagtatctcagttttaatctgttgaatatataggttttgcatgtaagatttcatgtcaagaaaaaagcaaaggctgggtgcagcagctcatgtctgtaatctcaagatgaatactttcaagtgtcaaggagaacttgattttccaacaacttgaaaacagaaggaattggctgatagactgcagaggctctgaaagtgtgcctctagatgagtgatgtcatctatactcacctttggtagatgtaatctgtattcagcttctctcctgacatctctaaccactaggatcaagctgacctgaccactggacagcattctgggtatgcgcacatcaggccaaggtggtatcttgatttgcagtcgcaaggtttaggcttcagaggggaagcagcactgcttccctttctaccttggagaagtggagtagaaagtaaccaggtggcagaaatgcccagggagcttaatgattgcattggccttgtcacatcacaatatcacagcacacattgctcagccagtccacattcctgtctctaacacttgggggaaaaagagagctaatattgttgttctaattttgtaagctaatatggtagagacttttttgttggtttctttcacaaatttcattcacatttttagtgaaatcttgtggactatttacttggaacacatgaagttgggtgttcaaagaaggaaaaataatttccaattatggaaaaagggtttgagagttctctggatctctttatctatggtggcgtatatgactgttgctctgtttggacagggtctaaggatgaatagctattcacttattcctcacttgctttcaagccatgccaactactaaatcctcagatcagctactaaataaaacaagaatatgttattatgtgactcatccttcttgtttttccccctgtatttcaaatttaaaatggtgtcgtgtgaagagattcaagatttccattcctgcttttccctttcctgccaagctcatgacctctgccagctccatcttttccttcctctgcttacagttttggtttgagttctggattcttggagtttatagaacaagagtcatttaaactcttttttttttttttccaaatggaacaagtgtcttaattgaggtcaggccaacacttagtgtgacagaatcttctcctcaccttccttgggacagagagaattcatgccaaggagaatggtgtgaaactgtgaacccaaagagtgtccattgggataaagctgatgcccagttggaggcacagcacagtgactgttttgccaggctctgttgttctgtttggtcccaagccagatggtggcctggtgggtgaaccattggctctggcctttctttcacctcctcaggtataagatgaaatacccagctgtccctttccttgcatgagtgaccctctggaaacagtaattgccctcattgttacttaatgtttacatgattttgtttaaatttggcttttaaaaaatatggtttattggtagtatgaaagtatcaaattaataaaattcaggagtggaatttatttaacaccatattcgagtttaaacagagcttctggagtgagcatgagagaggaagtgggcagatttgaatgagattgaacgagtatagttcatgtattatatatatcattattttgatcactagaaatacgttcaagatgtgcttgcattagagtttttattacgtgttatcttttagccactttgtaacatacataagatggaaatgagcatccaaggtctccctcaaatggaaatatatccactgaatctgatgcgacttatgcttttgtccctggattgtactgtagtattagttatgccttatctgtataatggtaaaagcaatagcatttacaggtcttacgatttgtccagtctcaactgtagtaggagctatttgaagctatcaagaaggaattctgaaaaagacacaaagaccttgtcattctacagagcttcatcgagatcttccattttcataccagctttgatttctatgattatgatgcattactagtagcattcttacaattttacttaattttggctttattaaaaaatctttttaaaagtaacaagaaacatctcggaattttcttgataatgtttcggagacacataaatgtttctaaacaaagcaaaattactttggcatgttgcaggggacaggggtggtaggggtggtgcatgtcttcctgctgtggccctgtccagagtctcttgttcagccctggatttgcagctcaaagagatatcctaatttctgaaggatctagttgctgcctgagtcacatttctttaagccacagagctataaataaatgatggttatcccacaattgccccttttaccataatgtaactgaaatgatgcaactaatattgttgatgttgttaggaaagtaatggttcttgccttgcctttctcataggattttatgataatgcaatgagatagtggattcaaaggtatttttaaggtgttatgtgactgataaatataaagaggcattacaattattactgttattacaattaattttcctactatttttatcatgaccaacatcatcattattaatatcttcactgtcggggtataacttctcaggcccatctcctctacctcctgagcaggagaagggaaatcatacccattggttattacaattataaagacttttttttctcagataatttgggggctcaatataatgtttctgactctgggcccctgaatttcttttaattccattgctgggaatatttcactcctgctaaaaggctcaacttaggctagaggggccagctctttaggggaatttatttttattttttttgtttttgttttttttttgagatggagtcttgctctgtcgcccaggctagggtgcagtggcatgatctcagctcactgcaagctccgcctcgcgggttcacgccattctcctgccttagcctcccttgtagctgggactacaggcacccgccaccacacctggctaattttttgtatttttagtagaaacggggtttcaccatgttagccaggatggtctcgatctcctgacctcgtgatccgcctgcctcggcctcccaaagtgctgggattacaggcgtgagccaccacgcccggcctaggggaattttaatagctctaattaggagctgctttcttgatatcaagtaccattgctaatgattctgtattaactttgtgtctcagtctgataactggccttctgtcttgcttgtatgatgaaattctcaactatacctcaaatccagtcactgatttcctgtattggcactttgccttggccttagaaacctgcccagaatctcttaatcctccttgattttctacacttttctggctctccacctcccccacgcccatgcctacacacatgccagatttaactcctgcttgagtctcagtgtattttatcatgtaagggagacttcatcagaagtctagttaacgtctaacatgttgtctgagctatggtgtaagtagagtatggtaagaaggatactaaggaggagggaaagtatagaggagggagggaggagagagcgaaatggcatgaacatagcataaaagtacaagggacgggtatattctttcattcactaggttgtgacctttgtaaaggcaaaaaatcttgccccctttttttactgctatgtccctagtgtctgaaactgcccagtattgaatctgtccattaaatatttgttgaataagtgtttgtggaggcacactaattgaccggtttgtctggaggacacttgaatgtgagctttttaggactgggatcattgtggccttgtttattgctatagtgccatatagttttggcaaaatgaatgaataaatgttgggatcagtggcgttgaggctagaaggcagaaattgataatgtggattcttttttttgttgagatggagtctcactctgtcgcccaggctggagtgcagtggcgtgatctcagctcactgcagcctttatctcccaggttcaagcgattctcctgcctcagccttgctagtagctgggattacaggcacacaccactacgtgtggctaatttttatatttttagtagagacagagtttcactatgttggcctggctggtctcgaactcctgacctcaagtgatccgcctgcctcgtcctcccaaagagctgggatttacaggcatgtgccaccaagcctggtgataatgtggattcttgaatgctgaactaaggatttggtccttattgtgacaaggagagaaacagtgtccttctgatcttaacatttacttttactgtctaatgtactaagaattttgttcttgcaatgtactgtaatttgagccgaagggttcagaaagaaaatccttttgatactaaaaaaagaagggatatttttacataagatgcttctttttgagttaatataaatccagaatcttaattggtagatatgtttctaaaacatggtctttaaaaattgcttatatggatagtcaacatgtttacacacaacaatgctgtaagtatgtttctattcagtatcatataaataatagctatggtttcaagtactcagcaaagtgatgaaaagcatccactgttttcattctcactggtctactttggcatcctgtggttggtgttgagcagttgttcactgcttgaggctccttgaatctgggaaccagagtgaatatttccaggtgtcagattcatctcttcatctacctgtacttctggactctaacattgtccatattagaccataaagatgtatacttttcaaacactatgattctggaaaatgaaacctatctagagtacaacccaaatgctcaaattgagtggggggagtttatcttgatagacatatgtaaaggaatttcttttttaggtttttatcttcactgagtgattggactgcttatgggatcaaagcatcttggattgcaataaacattgtttcatgtaaataggagaatttttttgtgtgtgtgcatgtgcatgtatgtctgccataggatgtagtgtaaagccaagcttgcttgtcagggacaattgctttgttagctatgaactaaaactggagttggaattagggcagggccgtggcaaacactcactgagcactggagtggcaggtgtatcctctacagggtgggagatcgttgtcactcttggctccccgttttcttcttatcttcatccaagcacccggcaggtttagagagatagagtccaattctggaggcagttgtcctcagcagggagaaacagaggaaagttatctgaaatcttagacaaaaggaacaaaaggcagtgggcttttaggtttctgaagtgtaactattctacagaaggagattcgtttttcttagatgaattactatagtctactagattttgtttacataaggaactgatttattttgggcttactggtgtgtggaagcacaactaatattccctaactaatgttagaaaacagaaaataaagaagaaaatatctataatctcaacatgtaatcacttaattttatatttgattttaatgaacaatgcaatatgaagatattatgaacaatatgatatatgttgttttgattaggttaatttttcttcctaccactaccactatcataatggttattgtcatcatcaagtatttattgagtcccttctctgagtgaggcatagtcgcagccagagtgaagaagataaacaaaaggcgtgtgttttcttgtaaggagattattttctattttggactgaacatatatcttggaaacaaattacaataaatgatttattcattaggcaaatgattattgagctctattatgtgcaggccctttgcttagcatttgagaaataatgttgaacaagacattcctgctcttgagtatactgtgcagggtaagtgatagacaagcaaataagaatttcaataaattataatgcatgaattgtcaatgaaatgccacagacagcgagtgctataaaaggatattatattaaaagatatattgaaaaacctattggacagtgttggaaaccagaataaatttttttttaattacttgtttcctatattggcccttagtgagagcctaaggcataatcttaaatagtcaggtaatcaatacattttatgacaaattaaggtaatatagttcaacagtattacatttagctcttccaaaagaacactaggatggatcttgacaaaaatagttaaaagggccttaagttctctctagcatcagttgtctcagtatttgcttttgctggagtttaacattaacatttgacaagtacataaagtgctgatgttctatggtatgaaaggaagagaagactatacgttttatattctggattagcaagtgtcaaagttagcattccattatgaaaattaggaaaccagataggctttttttggtgaggcggggctaggcaatggatgttttcgccctttcaggaggatatgtgaataaaagagaaaaagcttagatctgttatacattggatattctgtctttacctgacataaaacttgttgcagaatagaattttctatctagagttattccattttaaactaactgggcatattttcttttctttatatcagatgaaaggaatgaaagctacgtgtttatactttatttgagttgttcagatccagagtgaaaaataccaagggagctgtggaatttctctccctggagatctttaagaaaaggtgtaggtattcagacacttaattcactgaaattgtttctgtagagttttgtgtgtcctactttaaaaaaaaacaagatgtgtaaaaacccagacttagaaaattgatattattgaggataattctttcctttctaatcctcatcactttagttttcctactaggtgaatttatttggtaatagatgaatacttaaaattggtgagcatttgacttaagaatattacttcataatattttaattgatatttgtgaagaatttcgaagttttcaaaacattttacattattatatcatttgcttctcagtgatcttatgcagtagacaaggttggtattatgattatttcccattttgctgttaaggaatctgaggataagaggctctgagatttgactgtgggttattaagttgcggggcttggcacagaccttttgatagcaaattctctgccttttttgcatgcatgaggcattacttttttttgttttgtttttgtttttgattttgagatggagtcttgctctgttgccaaggctggagtgcagtggtgtgatctcggctcactgcaatctccgcctcccgggttcaagcgattctcctgcctcagactcccgagtagctgggactacaggtgcctgccaccacgtccggctaattctttgtatttttagtagagacggggtttcaccgtgttagccaggatggtctcgatctcctgacctcgtgatccgcccacctcggcctcccaaagtgctgggattacaggcgtgagccactgcgcctggctattttttttcttaaattggagtatttgtcctgttttatattgaaatcaagtcactgaagattctggagaataggataatatctctggatcattcatttcttctttctgtaagctgaatgatggctgagggaaaggaaaatatgttttgggctccccccaagttacttttttgatcatttgccactttcttactaatgcagtgttgtagatggtaactgggggttctctatcagttcacaaaaataatttaacttataagattactgaattggtagtactggaactaaccagctgctcctaaaatagtgcattttggtttgaaaaacagattgggtttctaggaaatggagtaagtttgttaatgtactaagattaagcactttctgataaccatattagctatatatagtatccacttcagcttaccattaataaattagaccatgcacttaaaagaaccaaaataaaatcagtttattaactattgagtctttacattagagccacagtttatacaggttaagttttaaagttaatatccaaatgtgtacagcaaataatctctagcaagaaaaataggatatattattgagggttactaggttggctttatgcattgagataattttactttgtagttctggtttgaaaagtttgtttattttctctgaacacttcctgcgtacaaaatatgtattgactgttgaggatttaaaaatatcagaaaaaggcaaagaagaaaggagtcccttgttaacccctctgttttagaatagttttggtaagaaaggagggtgagttcattttataagaagaactagttagtagggcactatggtaactaacataattcaggagcatgcaaacagtagtggacagtaggagtatatgcttagggggatgcttgtagatgagtttgattagctaaattatggtgggccatgaattccaggataagagatttgttgtttttcaatagaagggattccagagctcttctaatccaggacttgcttttcaggtaaggaaaccaaattgagttgctcaaattactgagtagaggaactggggctggaacccaagcttcttgattaataagttaatgtttcttctgttatacgatctcatgtgttgccaatgttggttctgggagagaggaaagcaaaataaaagcagtgctttttgaataaattcttatagtcttagaaaaagaagattgattagaagggggaagttatttaaaattggaagaccagttaagctcattttgattatccagacatgtgatgatggagtcatcaatggctagagtgatgaggagaaaggaagtgccattaaaatcagtgagaaaatttgaagagtaagcttatggtgggaaagatcaggttcaattttgaacaaattagaaatcaagcagaaatgtttgattaggcagatagcaatatggggctgatattcttggtgttaaattatatttagcagctaaagaggattgactagctggttagcatgcaatataatcctttcacacagtgctactgagggcagttgagttctaggaagtctccccctgactcctgcttcaaggaaaaattagttctctattagatgcatcactgactgaaacatttgtttaataaactggtataggcaaactcacctcaaaaagaccaatactggcctgatgatataatcgtatgatgcttctttttctcctataaaggtgttcatagaatgtgcaatcccatgtaaaagctgtgtgttaaagaaaatggtgtaactcttcaaccctcataaggctttgtgagattttatggcatgatcgcatttattgtcatgatagtaattcagtttaataatgttaactagtttcatttggacaacgtatttgccctggtcattcatcctttgttgttttaaacttacatgtactgggaaaccacatataatagctcttgatgtttctactaaaaggcagagaacttgagctattatctagatagtctatgaaaattttaaagatggggcagtgtctttgtttaatttctctttgtgtatttccaaggatttgaaagtgaacaatgggaggtctatattttgctagcaatgattgctacactcacctgacaaaataaaagtgatttctttttctgtggtttaaagaatttttttttttttttggatacatagtcatagatttttggagtcagatggggactgtagagactgtctaattcagggataatacctggtttccatttctatgctgactttataatttagtagtggctgtttacagcaatgttgagaattcccacatctttgggttcagcttggcattaaagagtgtaatgataaattattgatgttttttatgggaacggggagggcccgcacaaacgtcatgtacttgctatcctgatctactctagttcttttgtttttcaggtgaggaaactaaaatctactgaacttagtctataataagcagttaggttgtaaagtgttcttttatactcatttctttgaaacaggtagagtttttctttacaaataatgttaaaaataatggacaattggccaggcatggtggctcacgcctataataccagcactttgggaggctgaggtgggtggatcacgaggtcaggagatcgagaccatcctgtccaacgtggtgaaacccatctctactaaaaatacaaaaattagctgggcgtggtggcacatgccagtaatcccagctacttgggaggctgaggcaggagaatcacttgaacctgggaggtgagccgagatcgcgccactgcactctagcctggtgacagagcgagagtctgtctcaaaaaaaaaataatagtaataaaaaaatagtaataatggacagttaagtttttaggctagttcacaaaagacttttaaaagtatttgttaacgttatccataactacttggtttaattaaattcttgtttgtactattcccataacctttgtttcagcatttatcatactgtgttataattacttaagtttgaaaccagcctttaccacttagtacctgtatgaatttgcaagttactcaaattctacatgtttcaattttcttatctcttgaaataggaaagtattacaacttaccttcatgggcttgttgtaagaatcaaattattaaatatgtaaagcacttaaaaaagagcctggaatcttgaaagagtcatgagaatccttctcaatggtgctttaggcagcaaatattagctggaagtgctcaaatattaggtattgttattcttactgatcagtttcactcactatagttcatccttgtatacttggatctagaacagtgtctgcatttaataaatttctttgaaggaccaattaaataaggaaggggcagaggaagacgctatcacatggtatctcatagggtgaaagaggaaggaagagaccagctcttttaacaaagtgctatttccatgcttgttgagctccactctagaagaaagtttctttttccttagtcgttaagacttaatgttgctgatctctctgatggccagtgatgatgggcattttttcatgtgtctgttggctgcataaatgtcttcttttgagaagtgtcagttcatatcctttgcccactttttgatggggttgtttgattttttcttgtaaatttgtttaagttctttgtagattctggatattcgccctttgtcagatgggtagattgtaaaaattttctcccatactgtaggttgcctgttgactctgatggtagtttcttttgctgtgcagaagctctttagtttaattagatcccatttgtcaattttggcttttgttgccattacttttggtcttttagtcatgaagtccttgcccatgcctatggcctgaatggtattgcctagggtttcttctagggtttttatggttttaggtctaacatgtaagtctttaatccatcttgaattaattttgtataaggtgtaaggaagggatccagtttcagctttctacatatggctagccagttttcccagcaccatttattaaatagggaatcctttccccatttcttgtttttgtcaggtttgtcaaagatcagatggttgtagatatgtggtattatttctcagggctctattctgttccgttggtctatatctctgttttggtaccagtaccatgctgttttgattattgtagccttgtagtatagtttgaagtcaggtagcgtgagcctccagctttgttcttttggcttaggattgtcttggcaatgcgggctctttactggttccatatgaactttaaagtagttttttccaattctgtgaagaaagtcattggtagtttgatggggatggcattgaatctataaattaccttgggcagtatggccattttcacgatattgattcttcctatccatgagcatggaatgttcttccatttgtttgtgtcctcttttatttcattgagtagtggtttgtagttctccttgaagaggtccttcacatcccttgtaaattggattcctaggtattttattctctttgaagcaattgtgaatgggagttcactcatgatttgactctctgtttgtctgttattggtgtataggaatgcttgtgatttttgcacattgattttgtatcctgagacttcgctgaagttgcttatcagcttaaggagattttgggctgagacgatggggttttctagatagacaatcatgtcatctgcaaacagggacaatttgacttcctgttttcctagttgaataccttttatttctttctcgtgcctcattgccctggccagaactttcaacactatgctgaataggagtggtgagagagggcatccctgtcttgtgccagttttcaaagggaatgcttccagtttttgcccattcaatatggtattattggctgtatgtttgtcataaatagctcttattttgagatacatccaatcaatacctagttaattgagagtttttagcatgaagggctgttgaattttgtcaaaggccttttctgcatctattgagataatcatgtggtttttgtctttggttctgtttaaatgctggattacatttattgatttgtgtatgttgaaccagccttgcatcccagggatgaagccaacttgattgtggtggataagctttttgatgtgctgctggattcggtttgctaatattttattgaggatttttgcattgatgttcattagggatattggtctaaaattctctttttttgttgaaatgcaaattaaaaccacagtgagataccatctcacagcagttagaatggcaatcattaaaaagtcaggaaacaacaggtgctggagaggatgtggagaaacaggaatgcttttacactgttggtgggaccgtaaactagttcaaccattgtggaagacagtgtggcaattcctcaaggatctagaactagaaatactatttgacccagccatcccattactgggtatgtacccaaaggattataaatcatgctgctataaagacacatgcacacatatgtttatagcggcactattcacaatagcaaagagttggaaccaacccaaatgtccttcaatgatagactggattaagaaaatgtggcacatatacaccatggaatactatgcagccataaaaaaggatgagttcatgtcctttgtagggacatggatgaaactggaaaccataattctgagcaaactatcgcaaggacagaaaaccaaacactgcatgttctcactcataggtgggaactgaacagtgagaacacttggacacaggatggggaacatcacacactggggcctgtcgtagggttgggggaaggggcgagggatagcattaggagatatacctaatgtaaatgacgagttaatgggtgcagcacaccaacatggcacatgtatacatatgtaacaaacctgcacgttgtgcacatgtaccctagaacttaaaaaaaaaagacttaatgttactgatctggatgtgatgttgcaaaggcaacagtttgattaatctaagctggagtagctaatagtttcccagtggactttacgctttaaaagatgatatgtgctaaccaatcacctctctcctcttggtagtatttttgttgccctcacaaagtcagggacaggggcaggctcgataaattgcagggccaagaacaaaatgaaatgtgggggttccagctaggaaagtcactttccccttctaccccaaactgcagatggtcaacctacaaatgatcctgccaggattcgcttggtacctgaattgggggtgggcaagaggaccccactgagtcacccacctaaagtggcatctcactgctggctcaggatggggatggccatttcctctctgcaacccagtttctgtccctagtggaggggggtggctggaggcaggactgcacatgagtcacagtgctaagccaagctctgttaccccattggactttatatacaaaatgcaaattcaaagatacagttattaagaatttaaagataattaccacagaacaaggtcctggaccttttgagcccacgactctatgcagctgtactggctgcctgcccatgaagcccaccttggtgaagagcattttttagatatacccctctctctgggtagggtcttctttgtgggcagtccaattctgcctgggaatttggactttaggacaactctccattattggtcagtttcttggctgctgctgctttggaacatacaggtcactaaaagcaccattttttaaaaaagaaattgaccttttttctatcattaccaatccacgtagatgtactcaacttaatggttgtggacatgatgcattagccacatttctcttaatttcgctacagggaggtattattgtttctattttacatactggagactgaggctcagagtagttgataagtacctttcctgaagtcatgtattaattggcagagctgaaatttaaacttgggagagactgtcttattctttagcctgtactggctctcatgtaaattttagcattaaatctatatgacacatatgttctagcagcagctttttgcctcaggaacttcctatttatttatttatttatttatttatttatttatttttattattttttattttttctagatggagtcttgctctgtagcccaggctggagtgtagtggcatgatctcggttcaccgcaacctacgccttctgggttctagcagttctcctgccttggcctcccgagtagctgggattacaggcatgcaccaccacgcctggctaatttttgtatttttagtagagacggggtttcaccatgttggccaggctggtctccaactcctgacctcatgatctgccagcctcagcctcccaaagtgctgggattacaggcgtgagccaccgctcccagcctacgaatttcccatttagtgaacttagtgtgtatgcttgtaggtgctctagagtttttaagccctataaagattttagttattaatagagatttggtcctttatgcaataagattgtgcatctaggagtttgatttttttttctagtgttttgctcacaagatttctagtctgctccgattttttctttgagcatgctttttatccttaactttgccgtcacctcggagtagcttcttttggttagtattctctgtattcctgagtccctgtgtgtcagagaatgtaagagttgaaaatggtagactcccacaaggaaacaaacattgctttttaaaagctcattaaaaactatctaaagtgacctcaagggacctttagaggcttctttgaaaagctttgtttactagtagccttctgtactagtcagagttctccagagacagaaataataggatatctatttatggatggatgggtggatggatggatggatagatgataaggggcttattaggggaactggctaacacaattgtggaggctgagaagtcccacgataggccatctgcaagctggagaaccagggaagttgatggtgaaccagggaagctgagggcccaagagcctgaggagctgcaggtgtgagtctcagggtccaaaaaccagagaccctggagttctaacatccaaggtcgggagaagaagggtgtcctgactatggaagagtgggaagaaattcacccttcctccacctttttgttccatctggtcccccagtcgattggatgggtgcccatccacattcagggcagcagatcctcctccccaggccaccgactcacacgccaatctctcccagaaacaccgtcacagatacacccagaagtaatgttttaccagctatctaggtattccttaatttagtgaagttggcacccaaaattaatcatcacaccttctgtttaggaatgtcagtggtggagaatgtggactgtactgtctgacagatgtggctcaaatcttgcctctgccctatgatcttgggactttaaacattttttgtaacctctttaaggcctcagcatcttcacctgtaaaatgggagtaatactattctcaggttattgtaaagatcacatgaactaaggtatatgatgtgttttgtgttgtacctggtacatagagtgctatcagtgagtattagctattattatagattaaaggatctaggcttagaatagtaacccagggatgtagtctgtgctatattagagcaatctgcatagacatgcctgcatggactaaggggtcagaataagaccaaatgaaagtctcttgagagtcgtgtctcaggtttggtagatttagctccaccatggactgtttaacgtggcacgcttaatgatttaatctgaggtccttggagtgaaggtgtatgcttgtaagtggattcaacaaacatttattaagcacctgctattgccaggactttgtagctgctggtattacaaaaaaaaaaccaagttggcctgtgtccttttgtagtttatattccaactatgagacaaatatgcaaacaaatgactgatattaaatacaacacaagtgctttaaggtacttaaaatgccctagggcataataatgcagaatgccctagggcataaagtgagttggaaggaagttgttctttgttaatattttatcttcagggctaagaatgttcttattatagaaggaccttcagtaagttcaatgaattattttgatatttttagtatagattgatccttcaaacaccaaacatattgaaaatgtaacttaactttgggtatttaagtgacagaagcccatctttaaattttcctaacaatattatttatcctttatcttcacaacttaggtgaataggagttataggcaaaatcttgttaattatgtgaagactacctatatctgcaatgtgcaaaagggtttcttagccactcagggtgggtgtgtttctaaatgatcatttacatctatgggaaatatagctggcagttgagaaatgagtctaatattagttagaataaaagtgatattaattagaataatagttagatattcacaattaaaatattagctactatgtattaaacactatctaccaaaaataacactaggaaatatatctatttcggtagtttatatacaaaattaaaataaaaaatatttctgtgaagagcgaattcccctcatttactatttgtttagctaattttaaagtttgtataaaaagtggaaaaatgctactctttcttagtttctgagtttttaatgacaggagtcttagggaagtttttcatgtacttacaaaaaacacctgaggaatatagagcagatagatccaaatcataaacatgtattggtaaatgagcaaaaatggaaaataattggtgtcgcgggactgttgaaacagatttaataatatttaaaaaaaagtcactaggatatgctttgagaactatattttctacaacacagtagcatcattaagtttttaatatttgggtatataatagttagcatcatgggctctgaagccggactttctgttttcagttttagttcttcacttaccagtgtcactttgggcaaataatttaatgtcttcatgcctcaattttatcatctgttaatttaggataataatagaacttccctcatagggtcattgtgaggattaaatgagttcatatacattaggcacttagagcagagcctggaacatagtaagctctcagtagatgttagttgttgttgttgttgtcattatttttctttgtagaaaggaggagggatggaacttctgatgcttatttttaatctatgttacagagtcttccctttggtatattttttctaaactattttgtttgtttcagccttcttaaagtcacgttttgcaaccctttctgaactaaagtgtctaggctttgaacttcagtagctggtaatgtcataaaaggagaaaattaaacattatatgtcttttgtttaacctctattacggcaccaaatagtattacaatttattgatatttatggtggtattttctactgagctgtgagctttttgaaagaagagacctacactattgtgtttagtacactgtctggtactaggtatgaggcctgagcccctaatagttgttctgttaactatactaacatctcatttatcaggtttacctaatagtgtgcttttcaaattcaaaaacaactgagtttcctagctgtctagctacatgaattaaagtatgttactttaaatatgaagattttatttttttaagtatttaggataatttttcttataagcattgagcacatcccatccttcataagcataatgtaaattcatcatcatgcgtactgtttattggggctgtaatatagtgtctccatggagggtattgacatatgcttggttgtatggttctatatcacatactctgaggatgccttatgcattttttctttgcatcttatgtattatttttctctcattatcataatacaccaatttctttcttctttctgccacatctagcaaccctagcttcctaaattcaaatttaatgcttctaacctgctgcggattgatttgcttactaacttcattagaacctatagaaaaagaaagatttattaataagatcttaaccaagcttgagggcatcttctgtgagtaaaatgcagaagttcagcacatagatagagggtgtgacatctatttagctagccatataggttttacacttactttatgacattgctgaggttgtcatatatgtgtggcctccaggcaagtgattttttattatattaacctctgtacagaagaatgaaattctcttcagtatttccgtagtgttaacttatggcgttggaattcaaatccagatctcctttactccaaagtccattttccttggtgctagactcatgttataaaaaagttaatattgttaattattacagttcattaaagtgacatgatactaggatagtttttggtttaaaacacaaactcggcccggcacagtggctcatgattgtaattccagcactttagcaggctgaggcaggaggattgcttgagctcaggagtttgagactagcctgggcaacatagtgagaccttatctctacaaaagaatttaaaaattagctgggtatggtggtacgcacctgtagtcctagctacttgggaggccaaggtggaaggattgcttgagcccaggaggttgaggctgcagtgagctatgataatgacactgtacttcagcctgggcaatagagcaagaccctgtcacaaaacacaaaaaaacacaaactctttgtctttgtcctattattggcatttttttctatataagtttttaaaaatattgccaattatggattgtttaaatatttaattgatagatacatattcaacatatattttacaacagtaagttacacagatataggttacatttaataacatgcacttttaaaaggtctacaatttaaataacctgattactatgtttatttgtaggctttgagctcaatatacatgcacatctacatagaagaagtacttaaatgtgcctattttacttacagtttataaaacgctagaaaaatattaaaaagattcaaaattaagtagctttgaggcatttaggattagacatggattcaaatcatagttttaatcttagaatgttagctttttcagtacttcctagggttactgtaaggattaagtcaagtagcattaacgtgggatgcgccataagacaatatttgatccttcatgatctctttcctcttcattttttccatctatataattttgaatcttgataaaaaagagggagcaaaaaagtatagggaagaatgaaatatatttcttaagcaaaagcaactatggtttgcatattgtgcttcaaaatgaatatttttcttttatcattttgttacatgcagaatacctttaacttagccttcattggactaaagtagaaacgtaagaattggagcttattttcatttctgaggtgagttcatttgtagaaaaattagtatacttaaatcagtctactgtttctttggaaactttgtcatttgcatgtacctgggaatactacagttatccatgaaatgctgttagtgtgaagtcgtggtgagggttccaggctaggcattcggagctccctgtcaatacctgggctgtgctacagatgcccttcagtgttgtgaccctagttccttgacatctttgtgtcagtttgcttatttttaaaatggaaatgatatggcagttggccctgcttaccttccagcttacatattataagaatcaattgagatcatcgatatgaaagtattttattatgaacaatgtaaggtagaagtattaatatcgtgaagtgtcacagtgagttaaatgggaattaacaaagttacgtgcagagaatcttttttgtttttttttgtttgtttgttttttgtttttgagacagagtctcgctctgtacggagtctcgctctgtcgcccaggctggagtacagtggcgcgatctcggctcactgcaaggtccgcctcccaggttcacgccattctcctgcctcagcctcccgagtagctgggaccacaggcgcccaccaccatgcccggctaattctttgtatttttagtagagacggggtttcaccgtgttagccaggatggtctcgatctcctgacctcgtgatccacccgcctcagcctcccaaagtgctgggattacaggtgtgagccaccgtgcccaaccacagagaatctttttaagcatgaaacttttgaatgttattgtagcctaatgcccctggaacagtagtaaaacagggccatcttatatgttgtttctgaataaactggcaaacaaatagaagaaaaggaagaggaggaagcagctgaggaggagagaaaacaaaactaaactgattatatggtcttgaaagcattgacatttttagaactacacatcacttgaaaatttttgaaggcattgttaatctataggttattaaaaatgaattttctggccaggcatgatgactcagtcctgtaatcccagaactttggggaggctgagatgggaggattacttgagctcaggagtttgagactagtctgggcaacatggagagaccctttctctacaaaaaatacaaaaattagctgagggtctcactgacttgggaggctgaggtgggaggatcacttgagtccaggaggtgaaggctgcagtgagctgagattgcatcactgtactccagcctgggtgacagagtgagaccctttttcaagaaaataaaaataaaaatgtattttccattaaaaaccagcttacattattttcaatgtttttacatttcttgctgtggagaaaagcctagtcccttctctagaattttaatcattcatctggatgccttgatatatgtggtatgatgcttagtaaaatggaatggatatttcttctatctccattagtttttctgtttgtttgtttttctttttacctgcctttatttctgttgttgttattcttcttccatccaccaagaacatgtggtcctcttatctctgggctgaggtgttttcacatgtccttttattctttcttcatctcacaaaaggtatatctaggctttttaaaggtgccaagatactatttaatgaacaatatgatatggattggctctgtgtcctcacccaaatctcatctcaaattataatccccagaatccccatgtgttgagggagggagctggtgggaggtgattggatcatgggaatggttttccccatgctgttctcacgatagagagtgagttctcatgagatctgatggttttattaagtgtttgacagttcctccttcacacactgtcccctctcacctgttagacgggcttgcttccccttccccttccaccatgattctaagtttcctgaggcctctcagctatgcttcctgttaagcccgtggaactgtgagtcaattaaacctctttcctttataaattacccaatcttgtgtagtatctttatagcagtgtgaaaatggacgaatacattatatttctttccagtatctgttttgggagaggaatgctggtcagctgctagtaaaatcatctccatgtactccattatttaggtatcgttcaattctagtgtggtagtcatgactacctaggtggtcatttttgtctaatgttgcagctgctatttctgtgtcttagtctacaagaaaacgttatattttcctcacatagcttacttattctgttccttgcataatgaccgaggtggctgtattcaaagccttaacaatgattaacaacatgtcctttaatcttcagcgctagctcaagagttttattctcctgtggccactgtaacctccaaactatgagtaatctggcaagtacttttgtgttctctttattgcaaatcatattctttttcatctttaagaaatgttgtttcttagtaaacagtaggtcatttatttgacttctccaaaaaataattgactatttaaagaaaaatagttttaaggaacatttaccagttgcttttttatgtagatagtgagtgtaggatgtagcagataggccgggcttcatagtcttcactgtttagttttgggcatgcatgctctctgagccttaaatgttatagttgtaaaaggggtgtagtgttgggattgttaggattaaatgagatagtgtatataaaatgcctcgtacattgtggagcacaaagaagttcacagaataatgtaagtattgttattactgatatcttctcctcattgttgttgtcattatcaccataattatgtgggaaaacctaaagggagttttgtactaatgggctcaaaatggaatgcattgttgatgaaggtctcgatacagtagatcaccttgacaaattgtgtgtagtcatagtttctttgatacaccattcatctcgttaagatgagaatgtccagccagccctagagatatgtcaacatttctggctgagattaatatagacttatgaaaatgggttaattggtcactaatgagctgcattactgggaatagggttagagttttatgaaatgcgtagtttcactttagacttacctactctcaggagtaggcagttatttaagtagtagccagtttgaaagaaaaaaatctaccttttcagtttgtttcctttttatggataaaatgaaaaaattccatcctgaaatcagattttaaggaacagatatatatagtgattaaccacccagcttccttttgcctacacacacacatgcacacacacactttatcttctgtttttcattcagaatatgactgcacaagctgtaggggttagctaacagcacactgaacagctttttgctgccagtttgggggatgattgaaattattgacccttacacgaagacaaaatgaaatatttttatgcaagaatactagaaaaaaatcttctctattcagaaaatactttagctcttagaatctttagcatgaagtcacatgatgtgaaaaagccaattaaaagtcaattaaggccaggcatggtggctcatgcctataatcccagcactttgggatgccaaggtgggtggatcacctgaagtcaggagttcgagaccagcctggcctacacggtgaaaccccgtttctactaaaaatacaaaaattagccaggcgtggtggcaggcacctgtaatcccagcttttgggaatctgaggcaggagagtagctcgaacctgggaagctgaggttgcagtgagccgagattgtgccattgcacttcagcctgggcaacacagtgagactccatctaaaaaaaaaaaagtcaattaaatatttttaatggtggaaggcttattaaagttttatattctgaatttgtcttcaaaatactttgaaaagagaataaacatttccaaggctacaggaattctgtttagaggatttggttaagctagctaaaaacctggatagcagttgcccatgacattttaattattctatctaaaaaagatgaatttctatgtcatatatagatatgcctttaaggtactatgatatatatttttgactgaactttttgcacaagaggcatttctgaaataagtaaatgggatatttgaaatgtcatctgtgaatctatttttaaagcagtatttaacatctaatagaccttgtgtgctattgtagatattcttatttatatgtaaaggagggcatgccatttgtatctcttttttttttagttatatgggagatgcaattattttctgaggggagtgaaggaaaagaagggctatattataatttgaggacatagttattatgggagactctcttaaggaaccaacaagaaaggaagtatagatgagcagcggttagaaactagtcgatactgataacaatgtatagtggtcctaataggttcgtaattctcttaaaaggaaaacaggaagcaaatacagagaagattgagtagtcatatgccagggtaaagagaaggcccctgccctcaaagagttcatagttttatttacaaactagaattatctatcttaaagtcccatcgtttttaagctgcctgcagacaattatagtctagttctagtgtatcttgttgaatctttatttttcagaattgtcttcaagtacctagctccatgcttacagtttatactccccaatataggttaaattaaactggatggaatcaagtgctaaaaaaaaagtcatgcttttattcttccagtgatggacagcagaagttttagagtaatcaagatctgaatttgaaacctggctctgccacttaacttatgtggtcttgggcaagtaccaaactctgagcttttatttcttctgttgtaaaatcatgattatcatacctatttcataagttagctgaatgggtaaatgactctgtgtgtgtgtgtgtattacaaaagtgtttatcaaataactgtaattatcaatatggttatcaaaactaaggaaaagttgagatgccccaaagttatagagatgggagttgatataatggagagggttccaggtgacgatggacttcagaagctacacaggtgaatttacagtgttgtgatagccagtacggagccattttaggttcttgatccctagaagtgtattgtgaatagttaaatcaaaatgtatttaaacaggattaatcgagagatactattcaagaggtgtgtggggaggtacagaccttgagagttaatcatacctatgtaaacattaatgaaggcactgtacatatcaaaataaactgtattcctgcttataaaaagtacctcaacatatttagacagattgaaatcatacacgcattctgtgaacacagtggagtcaaactagaaatcaataacagaaagataagtaaatctccaacattgagaagataacacaacacacttctaaataatccataggataaagagaaaatttcaagggagataaaaaatacactgactaaatgaaaatgagaacagaatatatcaaaatttgtgggacacaactaaagaaattaaaaactaacagaaatgcagaatgcctttgattcctttgatgccatcagtagattggagagggctaatgaaagaatcggtgagcttggaggtagggcaatagaaacttccctaaccgaagccataagaagaaggaaaaaactgaaacagaatatttaagaattgtgagacaattacaaaaggtgtaacatatgcagaatgggaatgccatgaggagaagaaagagagaaaggatcaaaagaaatatttgaaataataatgactgagaattttccaaaattaatgacagacatcaaaccacaaatgttggaagctcaaaattaatgagagacgccaagctcaggacaaacaccaaaaaatctacagacaggcatatcttattcaaattgcagaaattcaaagacaatgggaagattttgacaggtcggggggtgacttcaccttacctttaggggattaagggtaagaattacatcggacatctcttcaaaaactatgtaagcaagaagagagtagaatgaagtatgtaaagtattggaaaacagaaacaaaaatcacttagaattcagtatccagtaaaattatccttcaaaagtgaaggaggagtaaagactttctcagacaaaagaactgggaatttgctgccagcacagtgccttacaagaaatgtttttaaaaaagatggatttacaaatattttctgctagtctgtggcttgtcttttcattttcttaacagtgtcctttagcccatttttattggcttgaatattttgctaccaaagtttgatattaacatatattgtgctttaaatatttctagaaatagcatctctgcaacaaacattttcagtttaaacttattgaaagtctcaggaatggagtgttgttttgtgttcaagtaagtcacaaagcataaatatttcactgaaatgtaaatagtaaaatctgtgattttaggccttgtattttcatgtaaaagatatatgctatcctcacataaatatggtggtattaggagcaatgcctgactcttcaaattctattaatgactcagcacccgggagagtgttccttattattgttgctgtgtttgtgtaacattctctaaggttctttgtagtgaggaacagatgacccttccatgagtcgggatccagtgttcttaaaagggccactgctgtagtttctttaagcttcatcttggattgttattagcatggcaaggacactggataagttatatacacacatacacccacaaggcaccccccctggtttgaaaatggaatctatgaattggcttccgtgcctgcttttattgccatggtgatgaataatctgctgagttttatggttggcatgattcttctggattaggtcacttgtgttttctttctataataccagtcgactacgcttttggtaacagttaaagttccatcactaaaaagctagtaggtagaatgcaaaactaatgatttagtagaattagctacatcaatgctttttaatctgttgattattccctttcagtgctaagtagcaggggcttactcatttcacagggctttaaatctttccattgcagtcagacctggtagggaattattctatgctgcagttataagtttttcatcatttattaaagcattatgggagaaccatcttgataaaagcatcttagtaaaggaaactagacttatttattttattttattttttttggggatggagtctcgctctgtcgcccaggctggagtgcagtggcacaaccttggctcactgcaacctccacctcccaggttcgagtgattctcctgcctcagcctcctgagtagctgggattacaggcacgcgccaccacgcccggctaatttttgtatttttagtagagacggggtttcaccgtgttggtcaggctggtctcgaactcctgacctcgtgatccgcccacctcggcctcccaaggtgctggaattacaggcgtgagccactgtgcccagccttattctttattttaatgagtcagaattttaaataccttgctttactgtatttacaaaagttgtagcaatgggtcagttgtcttaagttaaatttattagtatctaccaacattaaaggaaatattaaagtgtttcaattatgtttaaaataaaacacaagaatgaggagtgatggacacaagtaaaacaatgaatttgggatgataaaatgagttgttgatttagaaatatatactatatgccaaatggtcagatctacttggggatatagtgagagttaatctacttcgaatcgttgcttctaaagcaaacccagttgtgtaaagtcctacgtataaaggtagatattaaatccacgagggaagtaatcagaaccccaggtgcccaggctttgtaaaaaatttaaacagtaaaaacgtagtcacttgtacttaacttagatttaactaaacaaattcataaaatttcctgagtggaatgatggtttcagagagctagtgagtttcagaccttgaaaaaataccactcactgaactgtagtcattcttaactgtttaacaattgaaatctaagttgtcatatgtttaaattagtacagttctggttatgctgtgtcttttccaactcataactttcagtaatgaaaatagctttctatttaattagcctgaattaaattttcctctctcttccttctacatcactaatgaaagtggagtaatcatttctgcttcaaggatgactatatgatttcatttatccctaatatagtacacactacatagtaggcactcggtaaatctttattcattctttcaggaggcaaagcaggaacagattaactaattaccagctcagaccaagttaagaaaaataaagctacagattgtcatttcaaaatttgcctctttttgctgtctcactattttaaggagtgcccactatatcactaatatctctggcaagaaagcattccatgtgtatgtatgtaagtgtgtatcttcattttttgctgtcaccacacagacatcaggctttttcacaaaatctgaccccctcccttgaccattttttataactacctggcatgtatcactacagagcttttgttctggtccttctacttggactttggcagatatttgaactcttctgagccagtgctttcctcttcagggatttgtttttaagattttcttccttgccaaccacagagactgaattttatatcccacagatgagtctgagatttccagccccctccgtaaatcccatcactctgtcactcttgacagtgtaattatcccttttgtttcttgctgctttcctgcttgtaatctttgttcctcaacatgtccttcatctgaaaaaaaaggcacccaatccttcttgctttgtcagctctttaatttctcttgtgaaatagtcctcagatatcagctccccacaaaggctttctggaggagaagtggcattttgcttccttaaatctttctgtctattcaattttcatgagtgactgataactagccatcatattaaagtcttctgatcttatatttaagtatgattttttattagatttatgttttgttcagtgtttatgctgttcagtgtatgcatgtgctatgtgtacacttttaatatgtgtatctatacctgtatttgtaaaacagagaaacctaaaggccaaattctgcatcttatttttgaaccaatcaagcagcctactgatgtgagacaaatttcaacaaatgcttaagacacacatctgataaatatataataaaacttgtatgttgacagagcttgtaaatttttaaaattcatatttttccatctttttgttcatttctctgttatttgatgatgatgagtcaggattcttttaatgagataatgagatctttacaggtctaatgtccaaggttgatactgtggtggtgagtgaatcaccatatgatgaagacccattgtgtcaccgtattttagaatttttcataaggtaacaaaggtatgagaattaggcaggacaatgtaaatgaagtgccgtgtaaactacaaaatgtatgtgcacacccatgcagattttttttttttttttagtttttttccttttttttttgagacagggtatcactatattgcccaggctggatttgaattcctgttcaattcttctgctcaagtgatcctcctgcctcggcctcccaagtagctgggattacaggtgtgagccactgcaaccagctacatgacttttccggagatctcttgagggtgatttcaggtgatacacagttagtggtatgagataaagcacattgctgctaaaattccagacagtccccataaacgagtagaaattgcttcagttatctagcaggtaagtatcagatttgctggcttatcctgatttattgacacagatctgtggactggtggtatcctattggaatgcagaatgacatttaccttgaaaaagaaagtggatttttttttttcctaacaagatacctaggagtgagtgatctgtggatgttgaatttttttcattgtgacataattcaaaatgacaaagtgaactgaagacttattattttcatgcattgtatgctattttaagttttggagaaaagaacttcggagatcttattagtctgtttttacactgctgataaagacatacccaagactgggtaatttataaagaaaaagaggtttaatggactcacagttccatttggctggggaggcctcacaatcatggcagaaggtgaaaggcatgtcttacatggtggcaggtacgagagaatgagagccaagtgaaaggaaaaaccccttataaaactgtcagatctcttgagatttattcactaccatgaaaacagtatggaggacactgccttgtgattcagttatctcccaccaggtccctcccatgacatatgggaattatgggagctataattcaagatgagattccggtggggacatagccaaaccatatcagagattgaaaagttttaaaagtaaagtgatatccatacttacagatattgagatgtctgtaaacagtctcccttacaaaatagagcaatgctaagataatttgtgtgggagatatgcatatgtatatcgtatgtctttctaaaatattcatacataagactcatacaaagtgactatttaatatgtacttattataccataacagtcaaaatttgaaatagaactgatctgaattagtttatatgatttgacaacacataaaactttgataaactttattcatattaagaaaagctactttttctttctgggtctaagtctcatgtttacctaatgttgaagtctttgaaagaagactttttggtgatattttacatataccttatacataaagtacacagtttatcctgggagtctgagatgaggattgaatattgacatcaaattctgaaagttcataaaccttaggattcactgacccaaaggtgatgttttgatttcatattaagaagccatagaatttttctgttaagtcaatgaattctagaatattcaaagtcaataaaagataaagaataatgacagatgtctctatataaatgatgtaatgatgcttttgtactagtatagttaacctgttggttatcttcaaatttaattctgtatttacagtaaaaattaaggtgaccttctgggatttgagaggtagcatgaggttagtgggtaaacttcatcttcttaagtataaaatgactttacttaaaagttgatcaaaaacttttggttttggattaagtataattagaataatctatggaggtatacagtaaggattaccacttcatgagatttataaaaagataaacagatgtggtttttaacttaaggatgttattgagaatacagaaagacataatctataaccttttttgaagtgtagatatagaataggtctacgttaattttttaaattagaacttgacagtgaaaacataaatccaagatgtatgtatattttggtcttcaggaaaaatcttatgcatatttgtaccttatacatatacaattaaaaatccacgctgatgactaacaaatgattcctattgatctaaaaggaaaaagatgaaaaatcagcaagaaaatattgaaaactttaagaggaatggttttaaagaaaggataccatcactactaagcaaagaaatagtaattttttcctctatcagattgaaaaagatatatatatatttttttgagacagggtctcactctgttgctcaggctggagtgcagtggcacaatcatggcttactgcaacttttacctcccaggctcaagtgattctcccacagcagccttccggatagctgaagctacaggtgtgtgtcaccatacccagctaagtttttgtattttttgtagagaggagatttcaccatgttgcccaggctgggttcaagtgatgcatccccctcagcctcccacagttctgggattatagacatgagccaccctgcccagccttgaaaaatgttttttttttgtttgtttttttttttcaaacaagtgatatccagtgttttggtgagagtgtgagatagcagaaaaaaaaatctactggtagctgggtgctgtagtctgaatgtgtcgctccacaattcatatttgaaacctaatcttcgatgtgatagtatgaagaagagatggggccttttggaaggtgattaagtgatggagagccctcatgaacgggatttgtgccttaaaagaggtgagaaggaaccgtttgccccttctgccatgtgaggacactggtagaaggaaggcaccatctttgaagcagagagcaagtcctcaccagacactgaatctgctggcgctttgattttggactttccagcctttgctgtgaatggcagcacattacaaattacccagcataaggcatttttgctatagcggtctgaatgcactaagacagagtgtaagttggtgtaacatctcgggagggaaattttgacagtgtattaataatttagagatgggcatatccttttacatagcatcttctttagaattttacattaagacaacattctggaataggcataaagatttatgttcaaggatggcagttgcagattgtcttttatttttcagttgcagatttttatgataaatattagcaatgtactactcaaggctcaaggaaagattagttacataatttttggggggggtaattgtttaaaataggctgtagaacaagcttgtccaacctgaggcccaggacagctttgagtgcggcccaacacaaattcataaactttcttaaaacattatgactttttcttgcgtttttttttttgtacctcatcagctatcgttagtgtattttatgtgtggctcaagacaattcttcttcttccattgtagcccagggaagccaaaagattggacacccctgctgtagaaggcttcaatgagaaatcattcatagtgcaatggtctttttgttgtgacttctcaggatactttgagttaaaagattataaaaccagacagacagtagccccctttgaaaaaaaaaagtatgtatgcattaaaaaaaaactagaaaaatttataaaatgtgaaagcatttgtctctggctagcaggatgactcatgatttttgttcttaaaatagttttgtatgttctaactttctgccatggatttacttttatgatcagaaataatatttataatatataataaaaattttaaaaagtctgatatttggtgctgaatgaaacactagaaatcctgtaggcacttcttatttctatttgttgtagtaaagtgtgcttttattacttttaagttttcaggaaaatccttttaacttgatgcgcaagacaaaggcaaacaagattgttgtctttcacaagaaatggaggataaaatgtactattccaaagaaggaaaactgatgggctgagatgtagagcagtgtgccttctaactggagagctgcctgggggtttggagatgaaattttttatctattggttcacagaaccggctgcttccagacgattacttttttgttgagccccacaaacctcgttcttttagctgagtattatgtagtttttccagtattgctttctttccctcattacatctaggaaaacagtttggagatgagctactggagttaaaaaaatctatttggttttatttgtcaattaaaaaatctatttggtgtgtgttaggtttatttttgtgagtggggaatggcatatgactgtatattacagacatgggtgggtttcctacagattgtgaatgggaaaagtttgagttactctgttgtggtatttgtgttatagtattttcttgctttcttttcactctgagtatatgtggacatatttttgattgccttcacctattatgtgccaactattgtactaagtgctggggatacagtggtaaacaaaggctggcccttgccctcaagaagtatgtattctaatgggacagacagggcaaaaataaatgacatgcaacatcaccaactgtagtaagtggtagggagaaaataaaaaataaaagcacacagagattaatgcaagagggtgggttaggtttggggatagataatctcatacagcactttaaatatctgggtgtgcttctctgagcaagtggtagataaacaggcttaaaggatgagaattgctaagaaatggagaacttgagtttcaggcagagggagcaacatgcccagggagtccacagctggggcaaagtgagcaaggaggtcatagaagaaggaaagagacaaaactgaaaagtgaggcaggggacagatcctaaaagggcttttaggtgacagtaagaggctttgattttactatgactgcattcagacaacactgaagcgttctaagtaaataacacgaccagatttaaggaacaccccatttgttgatcactaagtgtatgattatttgtaacacttagcagaatgtgactgtcaatggacctcttttacagtatgctttgcttacatcagtagtgtgaccattatgttcttagtcaccctggagtaaagaagagttattgttgggcatgatggcacatctgtaatcccagctactcaggaggctgaggcagaaggattgctgtagcccaggggttcaagtgtagcctaggcaacataggaagaccttatctcttaaaaaaagaggttacaatttatgttacctcatctgatcccaagtgttatctagcaagggggaaatatttgaattacttagaaaactcagatgtgattttttaaatctaccatttattacttataattaatcaggtactatgctatactcttttcatatattatttgaaaataatatgtgaagaagatactattattttcattttatagataagcaaacagatttagtaatgtggccaaagttgtatagccttaaagtatggagttgggatatgagtctgttttgtacatgaacctgaattctttacaactacattctactgcctatactgatgatttgtttgtcacataacactaaattgtatagccaggaaaataattaaggtttagatttcaaatccatggctttttgcccataacataccacctcttgacgtagttggtttaatctgtttttcatagccccatgtcaaaaatagaaggggattagataccatttttagaattacaattaagaggtcttaaactataatctaaataaagattaagacttggttaggagaataagcattttatcaattgaaaataaacttgaaagggatccttaatattttgcccacccagggtaaacattcactgcactaacaattttcagccaaaggccccagctaaattctgccacctgggcaaactctagtccaatgatattcaaagaaattaaaccgttttaaaaactgatatgtcctctggcaatttaatgtgagtgtatcactgtggcattcagcttcagatcatgtgttgctgtaatatcttctctttatatgactgcatttctgttgtgtgtcactgacacggcttgtctgatttcaagccctttctatcactcctatttattggtaacatacaagcttcaaggatcatttgatgtgcaaatttaattgcaggttttacttttaaaggatgacataagctatatcattttaacaactgtttgcacagctttttctaaactgctactcagaaaacaggcatttttattctgtgtattgtaatgcttcctgacttgtcaaggctgcttgctcagtaattaacttatatgtaagtatgtatgtatgtgtgtatatatatatatatgtatgtttatatatacatatatatgatgatgttttgcagtgcttcaataggtacatgctttggaattaaacttgggcatttcccctgattttttgataagaggacaccttatcagcattcacagttccttttttgtatttactgatttgcccctttctcttccttccttcctcgcttccttcccattgctatatagcacatgattatagataggagaggttaagtcttgctacctagctaatgtgataatttcctgacagtatttcagagttaaggtaaaaatactccagaaaggattgatacttctgtaagaaatgcctttttttttctctaaatggcacttaagaacccggaagcactcatgattttaataagctgaagtagtcctgtcgttttgtttagagtttaactttttgtggaaaggacaggctttgaggacattgtaggtttaaaaatgcgttttacaaggaccttctagacaattcttttgatatacattcaccaacatgtccagctagctgatttggtagaatatgagactcttgatatgcactcatcaagctaattacaggggatgggagttccatttgagccaggtgaaatgaggaaagtctaagtaaaatcttcataattatgggaaatattgatactacatgccaaaagctttcattttccctgcttcaattctttgtacctattgtgtttcagcagagtctgtatttaaatgggaaattttcagcagaaatgggaggctctataaatattgttattcaataatttgtaaggtgaatttgcagatgtcctcatagtgactcataatttttccttattcgtcattaggttttgtgactatttggttatttcttttttcagaaattttatgttgaaaagtgtaaaactgctagttactgtattttagccaaaatctaattaaataggttttctccttttaaatttgaattaggaaaatgttctggggtattggatctgaatgagactgtacaaattggtctcattggtctcattttacaggtgaggaagcagaggctgagagaggttaagttactcaccaaaggttatagagctattaagtggcagacttggtgcacaaacacaagcttttggtttccttgtgctgaggtcttaacactttacatctaatctttagttataggacatgaaaggaaatgagaaatcactttttccaccaatttttttgtttcttgctgtctttttaactgaaattgccaaataagatcatgtcttattggagctgtacagtgatttctaggttgaaagtgacatttaaaatccataatcaaataagtttgtgtggtgtttcccttaatgcattcctaaacattgccaatttaaggcaaaactaccattttgttcatttatattccctgttacataattttgcggttcatttttctcaaatcaatattttcctaacttagactactaatgccatctatacacttaatttaagtatggtctcactcttctaaataacttctggaaagaacgtataatattggtcctgctatttatatttattcatgccaagaagtgtccatttcatttcttttttctttctttctttctttttttttgagatggagtctcgtgctgtcacccaggctggagtgcaatggcacgatctcggctgactgcaacctctgcctccggggcttaagcaattctgctgcctcagcctcccaagtagctgggattacaggcacgtgccaccgcgcccagctaatttttgtatttttagtagagatggggtttcaccatgttgcccaggctggtcttgaactcctgacctcagatgatccacttgcctcggcctcccaaagtgctaggattacaggtgtgaaccactgtgcctggctccctttttttgttttttctacctttaatcctagctctacagccaaacaatagcttcaacccatactgactcattgaatgttttaacaaattcccatcatttacatgccaggcatgtttgtccttttgcatgactataattgtagttagatatgattctcccaaagataagtcatattgcatctcctgtccctctccaggtaaattgttaaagcatttgattgatcattgtatccatacaaatttaactaacttagcatgtatgtaattgaaatttgataatatgtagtttagagtatttctttagaaacttcttttgggtttcttactctcactgaaaaaggtattaaagttaggagaaggattggtttagagaagacaaagcagatagtggatcttataagaagaaggaatgaaggaccgatgaggaattggggttgaacagtacaggaactgaaagtgaaattttgcttatacttccaagatgaatggattgtgacattgttgatcgattctgcttggttgtcctaacaatttatgtaagtgacctcacatcattttggatctgatgatcttagcttacagattatgttacagcctattttgtctgcctctatatttgtagttacaaagtatgggaatgtagggcaaggttaccagtaaagatgtgtgtgtgtgcaatttccagcttcaagagctttggaaaaaagtgcagtaaccaaatctgtcacattcgaaatatataatatttcctgtgactacttctggtaaactgccctatcatagaaaactgaaggaatcagcaaatacccatgagctttgcttagaattgttccactatcattgatatcctgtgtatggatatgaatgactatggatggtttcagtccatgccatttttttaatatttggacaatgatttgtcatatatcagtctgtgccagattagcctttcataagacttcattatcatctttactgatagataattcaggagccaaaggtatatcagaattttgtttaacagcagggtattaactgtacctgttaacttactattaggaaactgtctgtttccaagcagcaacattttttggcatttggcagacctatggaccatttttaagagacagtatcttaaaaatgacagggattggaattgggatactctctcagatttctttcagctctcaagtttagtgatactttgaaatgttgggttggaattttatgattatagtgtttattttgattatattcttcgttttgaagggttttcttcttgctacttttaatactgattttctcatcgaggaattatattagtactttctgctgttctctccattggtttcaagacttaatattattatcctcttctcactcccttcagtttctgtgtcctgccgtgtttttttttttccctaatgtccttctgttgcagtttgggttccccagaaagcagattttgagatggaaattagtgttcgggaaagtttattagaaagtgttcttgggggccaggcatggtggctcacgcctgtaatcccagcactttgggaggccgaggccagcagatcacctgaggtcaggatttcgagaccagcctggtcaacatggtgaaaccctgtctctattaaaaacacaaaaaattagctgggcactttgggaggccggcagatcacctgaggtcaagatttcgagaccagcctggtcaacatggtgaaaccccatctctattaaaaacacaaaaaattagccaggcgtagtggcgcacaccagtagtcccagctattcgggaggagaatcacttgaacccagtaggcggaagctgcagtgagccaagattgtgccactgcacactccagcctgggcggcagagtgaaactccatctcaaaaaaaaaaaaaaaagaaaagtaaagaaaaaaaaaaagaaagcgctcttgggatcagcccctgtggacgaagggaaggaaggaaacactgttgggccaagggggatgttgggctgccatgtagtctcaaataaaatctgaccctgtggggtgcttcaaagctgagaggccacctcacccttgtccccagttggagaaaggggaccaaggctttgtcttccacatgtcaaccaatctttggatgtgggcttccctgggaagggagtgtgatactgggtgaagtgaggccatcctgaaagagctgatagttgaaggttgtctgcaggcagcaccacagcagttggggaatcagtccttcagtcctgaaaggagatgtgggtggcatgtcacagtttccattcaatcttttttgcaggggtgctggagatgggaaggaatggcccaggggatgggtcagaattttcaggaataaggagttgcagcatacagtggtcaggagcttgagagatggtagagaacaaaagtggatgtagaataggttctgccaggcaattgacttctgacattgactattgcttttctaaatacattttaaaaattctatttatagtgatgcttttcacttttaaagttatagaaacctgatgaaaactctgagtgcactatacagagaatgtatttttgttttttacccatttcccatttgccccaagaatactgcactggcaacaagcagcacttttttattctaagtgagaaatgggttaaagagatgggtcctgctcagtcacacaggctggaatacagtggcgtgatcatagctcactcctgggctcaaactcctgggctcaagcagttctcctgtctcagcctcatgagcatctaggactgctggtgtgtaccaccatgcttggctgattgctgaattttttgtggagatggggtcttggtatgttgcccaggctgctcttgacttcctggactcaagggatcctcccacccgtggcctatcaaagagctgggattacaggtgtgagccactgtacccagcctgtgccatatctttattcaaatataatttggttttataaaacatacagattttttagttttatgttctttataggctcttttttctctctccatttctttaataatttaaatatacttttttggtgtcttcatattaaaaatcagttgagcactcaattttctgtttggcatatttgttaataatcacagtaaatcattttctccatattttgtaatctctaaatttataagctcatcttcattggggattgttttttgttttgttttgttttggtttggtttttctacccaaagaaatcccgtggggccttgtttacctctcatcactttaaaatagttttgtgtttgtttcttctagatactttacagatttcactggcccaggatctaattccttagattggagattcttaatttttttacctaggagattctcatacaaataagattcacatttcaaaactgttgtgtcataggtttaggattttaatttcttatagcatttatagcatttcccctgtcctcttcacccagattctcagagacaagctctcttaagtcttaatatgactatgagtgaatttctcctccccgacaccattttttaactatgaggatagacctttgaagacagccctggttttctggaagaatctcagtaccaactttatacctcgtgtgcccagggcctccccttctgtccctgcataagtatcaggactgctttagagttgtgaaggtttaatggggctggaaatccagcagagtgctttctctcttgagggagcactttcttctgttctttctccttcaagaggcatcttgttaccaatttcaatctatacttaagtgctgaagagactccagtgattatccccatagctccagtgttggccacagctgacagtgtatgcttttgtgcttactattttggccatcagttctggctttggtttagcatcagggaattatctttattgcaagtaaagctatgtatttaattttgttacacttattttcttcttttcttagtgtctgtagtgggaagtcttcatgagctcagttggccatatttctgtacctggaattcccgtaagttacttattaactaccgtttctcagattctacctctctaaaatgggagtaataatggtgtctgtgtatatagcgttaatttagaccacacagtaagctttcagtcaatgctagccagtattattttcaccatttaaaacttaaaaaaaaaatcatcttaggcaagagttggaagtgtagtggtagctgtgtttacttacttaacaagaggaggaaatcttagttaacgccctagagaaaccaaatcagaaattttgtttggtacagtacaatgccgaaactgacgcttagagtcccaccctttctgacgttgtgccaaaggtcacttggcacataagtaaactgagtggaatggcctctcaatattgcctggacgattgcttagaggagtatttcctgaactgtgtgggtaggtaagtttgaatttgttaatattttctttgctaaggagggctctcaaaggcgtaattattataaagggtatttgtagaccttgaaacatgtagcaatacttttagtccaagtaagccctttgattgctttttaacttcccatttagtattccaagtggattctgaacttggtgaaattagtggtaacccagtctcctcagggtcttgcctcctgtcttctggcttacagaggtggagattcaaaggatttctttcctttaggtcatggtatttaagagaataattttcccctcatattatagctaagaagaggtctgttgactattacagattgggaatccatgggcataatatacgaaatgtttaaaaaattactttgaacttaaccttatatgcaaaacattgattatcttataaatattaactgctttggattgtttacacaatgttagttgtactatgaaaatttgcttattaaccaggtttagacttcttaggttgttcttggctttgagtccacagatttaacactgccaaatttctgtgtaaacattttgcttgggacctaaaatacagttgaatatgtgtatttaaagtttttttttttaaagcccatgtatattaatggaacttgtaaatgtttaaatagtcaattaatggaagcttttaagaaacaactctttcaaaatattcaattttataattatgatgttttaaatatcaaacttgagttagtgacaaacatgtaattcataatatataaagatctataagtagttcttattgatttattacatttaatcttactcagaaggaacttttttgttattattctgtcactaataattaagtgcaaggctatttaaaaacaaataagagctaataacattgtaacacagactagatagagagcaaaaataaataactgattaagttactgttttggtcttgggaaatgtggtaggttcttgagtttaggtgccatggttatggctgttttgatccttttttgaaatacattcttggatgtgttgattttcttgtaatgtcactattatttcttaagacccttatatactgtaaagagcattatcaatttacacaaattttaactacccatagaaatattgtatacagcttttttgtagcataaataggtgaagttcctcaagatgtttatggcctggtatattcttacccttgctataaagctttggtcagctttagtggccaaactctaaggcaaatggcagtattaatgtggagtgtaaatctccatatatgttcttggaatggtatgtaaaatattttgttccctgatccacctgtccccacctttagtaagatacccttgtgtctgcagtagcttgagttataaaagaggtttccgtttttcagcaactagacttggaaacaaattttttcagtttaacttaagcaaattgtatataagaggaaatgactatggaggagatacgctgcttagtctcatttctatgtaaatagttctgacataaattgtatagagaagtctcctttgtagtttacttttcagtgatgtcatttgtcattaaatcgtcaaggtaggtatgaaccttggagttttaaggtgacaaaaatgaactcattacactttagacttttggccaggttctgtaacttatgcctgtaatcccagcactttgggagactgaggcaggaggattgcttgagcccatgagttcaaggccagcctgggcatcatagtgagaccttgtctctaccaaaataaataaataaataaataaataaataaataaataaataaataaataagcctggcatggtggtgcatgcctgtagtcccagctactcaagagactaagttagggaggatggcttgatcccaggagactgagactgccatgagctgtgattgtgccattgcactccagcaagggcgacagagtgagactgtcttagaaaaaattctagccttttaaataatagtgtagttgaattgtataaatattttttgaagagaatataataaggtaggttatcatgtagtctttttgatcatttatttataggatatttctaatgtaaacaatccagtattttaaaatttccttttttttagagtttgtttgtgtatttgttttgacttgtttaatttgacatgtaagcacttaaaaattgactttccagctacatgaagaaattatacgtcggttaaatttgtggcatttttatacagaatcgtgtgtacaaaatatattaactaggtttgttaatttgattagaaaaaacttgtggtagttttaatgctcaatatattttctaaaatgcaaaagcaatttgtgaaatattgtctctctgtacttggtaatgtaagatctgagctgaatgaaatgtgagtttcttaagcttgtcttagattttgtatcaacatttgttcaagagcttggttttaggaacatttgtgtgcattttcttgattattaaaaattctttgtgtcatatttagatgtaatttagagcaatattatttaactttgccaattatattattctgatcactagatttaatgctctggtaacaactctctgacaactcattattactctagtattagattccattggattctttatcttccttgtttctaaaaaaatgcctttcctcattatgcaagtaatttttctttatttcaccatttatacagttggccagaccaaatgacatagtgagtatcccttaagccaggggtcccccaacccctgggccatggttcagtaccggttggcagccttttaggaactgggccgcacagcagaaggtgagcagtaggccagcaagcatcactgcctgagctctgcctcctgtcagatcagcaacatcattagattctcataggagtcgaaccccattgtgaactgcacatgtgagggatctaggttacgtgttccttatgacaatctaactaatgcctgatgatctgaggtggaacagtttcattctgatccatcccgcctactcctgccttggaaaaattgtcttccatgaaaccagtccctggtgccaaaaaggctggggaccactgcgttaagcagagccgtgaatatcaatcttggacacaaagcctgggattgtgggtggggaaagccctcccgttgctctggcctggcattccaaagactctttcaattctcttaacttattcaaagcctggattctaaaagccaattgggctccctttgcccattcataattcatgctacagtcttctggctaaaaattgtcagtagagtttccatttcccattatatgaaattcaatgtccagtgtgtaacttatcttttgagtcgtgtatcttaatgtatggcttaagcttcttctttatgctttacagtttccatttcctgcctttttttcttgacacgtggtgtaattagaaagtctctccctcatattcaaaatttacctcatccttaaggtttactgaccactgccattaaatttttcttggtttcaccttcttttttctgcattttataccagtgttttgtgttccatcttctgttatatttatttttacatgtgttatattttacttcctttctaatgactgagtttaactgattgaattacttaaagtctatctcttactatgatgggttagaggtggttttgtcttgtttcttctaggttgccttgcattcagtacatgcttattataaatatttggttactgaaaaaaatgaagtgatatgacagtgttattgattacaagacattttactcctttgttggaatggacatttggggacaggggatcaactggaaatctaaacaagtgtggcatggctctctgaatcaggctgtccccagcagggaaagctgatgaaacaattaaggctgcagctaagaaatgttttaaatcatgttgcatagtggctcaatactgacaggcaaaggacagctcttactagggaaagactttggactgataggaaattgaagagaaacacaggctttgtagatagtgactacatttctaactcagataacattttctgtgagttcatagtgtgagaataaatacagtcaattctgctgtaatgattgttttgaaaaatgggagtttttattctttcatgattgatattaggcaacactttgagcataatgcaaatttcacttttgcttatgcgtgatttcacctgagaaatagtaggcgtgcacagaaaatttcacccaactaaaatgagctgcctaggctacacaaagtgtacatgcacacatctcagacattgcctggctgtctcactttgccacatgttatgagccatattcattcatattttgtattataatttcccctccaatttcagataacccatcttgcaccacttcccaataatttacatgcaaggcttgtggctgcctggaatagaaatatttctttcccacaaataacaattatgttaacatttttgagccttaactatgtgctaagcactatgataagtgcttaacatggattatgttatggaattctcacaaaacctgatacagtaggtattattactgtctttacagatgaggaaagtgaggcttagaggggttaattaacttgcccatggtcaataactcataaatggcagagccaattcttgaatcgagtctgatttagatcttagtgttctcttactttgtagattacagataagtagctttcacttgtgttatttcatatgcatttaataactgtctctgattggcatcataggctgtttcgatccctatgatagatgaggaaacaacgctactcagggtaagaatgcacagatcatcataggcagagcaataacaggaactcattctcatacctaaatcagaatttttttcctggggcttatacataaaaggggaagaaaacaattagagaattagagatagggaggtgaactgaactacaaaaagaggatgaaatgattgtgttggaagttggggaacaaaagaaggtgagttataatagtacttcagaattgtaaggagagagtctaatgaaaaatgaacactaggggacttgtaactctgtggtacataaagcctaatcaaattcttacaaaggaattaaaaccaccaacttcattacaagattgtggtaagagaaatctgatcatgagcataaatcactagtagtaatacgctcagaaatcagagggaagagcaaggcgataccagaggaagacttcggaaggatttatttgtatttgttttgtagcatgtgattttttttttttttaaggtagtgagttaccttacaggcccttacagataagcaagtacttgattagtgtttgttatactgaaagcttaataaatagtaaggagagtagttgttcagttgggtattgattaaggtgaagtaataggaaaagtaagggtagaatcgatgagtaatgatgaactcaaagcagagggtcagcaaactctagccattgggctgttttctttctacaagctgagaatgctttttacatttttggtaggttattaaaaacaaaaatgaagaatattgacagagactgtatgtggcccacaaagcctaaaatatttataacctggctctttaccgaaagtttgtcaacccctgacctgaaatacataccatgaagaaaaaagttagacttgttcccttttaggaaattggattaggtactgtaaagtgtaatatttcatggggctacattttcaaacatgtgcctttttcccacatggaggaaagaactgtcatgtatttagcctgctcttttgctataggggttttgcatacttcgattgttcttaaccttgagagatactataaccactttacaaatgaagaaactaggctcatagaggctaagtaagcctaaagttttacatttaataaggactgaaatgtaagcttgtctggcttgctaactagatatcaaatatgggcatttgtataaatttagttagtatgtaaaatagaaaaaaaacttgtacacatagacaatagagtaggttggagaattgtgtcattttattacaaaatttgcccaaggaagaatatctttggataagttgtaaaaaaaaacataaaatataaagaacagaaaattctagtctcatattaaaaatgtaatattcacctaaaagaaagatgagattcaagatgtttttgaaagaaaatgcaaaatacaaaagtgtgttttgcttcaatagaaagtataccagctagtactttatttttgaaatgcagatattaagcaaatattggcccaaatgtctaacagtaaagatttatgaagagaatttcagagtgctgtgaaaacatgtaatgtagaaatctaggatagattgggagtcagggaatggtttcccaagaaggggccatttaagctgagatacaagatttagataggcaaagatataaaagataattattctagacaagtgtgataggcctcgaggaaggaagaacttggcattgtcaatgctgcagtgcttcccgccttgccttttgaatcccaggttccacgcaggaaaaggcaaggccaggctcctcccctctgcaaaggtgcaaacttgctcaggctccaccccagtgcacaggccggcaggagctttgccagggatcccctcccacttagctgtctcaatgggagggaccattttacaagatgtttaccatactggtttgcagaattagagagagtaaccttaggtgaggagaagactgggatttggagacagaaggaaagaaaatagattcagggtcattcttgaatgttagccttctttgagttaaaaaaaaaatagctgataggtggtagcagcaacacatgtgcctctgattgtacaagaatttaataatgatacttgtgtatgttttacataagcttaaactttagtgaactttagttaatgatatcaaacattgagggttttaatgtctttctactggatatcataagtctgtttttccttacgaaaagggtaatattggctagccgttgaggttagtgtttgctaagagttggaagttttgaacagtgaggaaaacaatgtcactgggctcatttccaagagggtattctaactattgcagtcaacaactgatttgccataaaatgtcaataactttttaaaaggaaggtacattcatgtgtttattttgctttttaaatgagtgttaagtactttaattagcatcattttataattattgatattttgtatgggatttaataatggattagttaattatgaaaacaagatctaaatgttttcttctccaattgccgttaaaatttgttgaaatcaccttattgaacagattttttttaaaccccttggagtactagtgggtgttattttgttgaatgaatgttttacccaaacttatatgcatattagattgtttaaaagctcaattaaaaagtgaaaaatagacactgaaaattttttgagtgatttcacatgtgttcatgaaacaatatatctattacaaatcattgaatattttaaaagtaatgtcatgtattcattttcttattttatctcctcagtagactgagatcagtgtgtaggggtgaagcaaggagtcctactctgtttgactaaggtaaaaattaagaatcagtgagaaatggaatttgcaaaagtgcctgccagataatgttagaactggaccagaaaataggagttggtataaaactagaccagcgagcttttttttccttcaagatgcagttcagtttattgcttttgtaaattagagattgtgtttcttgatctttattaaagtagaatacaatgttaacctacttcaaattttaaaaaatatacacacatgtatatgtatgtgtgtgtgtatatacacacaggattttaaggacagttttttgtgtgtgtgtgtgcatgcgcacgcatgccaaggaaattgttaatcttctagtacatccccataacagaggcagctacaataagatctagtctttgccttacagaccaggtggctttacctgataggctcacagacattcagtagttcatttgttcctcagatttctctaattattgtgataaagttgatattaaatttaccaacttaaccatctttaaatgtatagtttattgtcattaagtgtattcacattgttgtgcagccatcatgaccatccatctctaggagtttttcatcttcctgaatggaatctctgtgccccaaaacaataactacccattctccaccttccacagcccctggcagccaccattatgctttctgtgtctttgaatttgactattccaagttcttcatttaaggagaatcatagagtatttgtccttttgtgactggcttattttacttagtgtaatggcttcagggttcatccatgttgtagtatgtatgagagatgtctgtttccttttaaaggataaataattcccttatgtagatgtatgatattttacttattcatctgtgaatggacaacacttgggttgcatctaccttttggctctcgtgaataatgttgatatgagcatgggtgtacaaatatctagtctctactttcagttcttttgggtatacacccagaagaagaactgctggatcatatagtaattctatgcttgatttttttgaggagctgccatactgttttccacaatgactacaccattaaagggatattttaaatgaacgaacaaaaaaacccagcaggaaaaccctctattcttacagtctttggaattttacaatgaactttctaaaataggatgaagatagcttcattggatttcttgtgtaactaataattctaggaagtgtggtctctgtccttagaggtaagtggtgggcagatttaaaattaatatatcggtttctctttggataattacggagtttggagacattaggggaataacaaaggtgagtctaagtttttccaaaaaaaaaaaaaaaaaaaaaaacaaatacatagagcagaatacaggtgggaagattcctatagaaatgaaagagacagatacaattatctcaaataatcaactttgcttcctgaaagtgtcaacttcgttctctgatctagtctgccttccagaatgcctgcatagttattttcttaaacattagtaatatgattgttactccttaccatctcctaaaagattaagtccaaattcctttatatgctctacaaggcccctcacaatctggcatcaagcttttcttcatcacatcttcttttcatatattctgtattgcagccacactgaatatctcactattccctgaaattcatgtccttccatatcctttgtatatgtctggaatgttctctaattacctgtacctgtaccaactggtgcactcctcactgtctttcaagacctgatgttactgtctcttcctatatgaaacctacaagcagcttccataggtagacactttcctagtacattgttcatacagtaataacatttactaaaatgcattgtaattatctgtttgtatatctatccatcttgctgaactgaatgttcccagaggagagaaagtatgtttattatatgtcatcatgcaaagcacaataccttgtaggcataaatgtccaaaaaataccaaatgaacttatttttctttatttatttttatttttatttattttttgagacggagtctcgctccatcaccaggctggagtgcagtggcgtgatcttggctcactgcaacttccacctcttgggttcaagcgattcttgtggctcagcctcccgagtagctgggactacaggcacacgccactgcacccagctaatttttgtatttttagtggagatggggtttcactatgttggccaggatggtctcaatctcctgaccttgtgatccacccacctcggcctcccaaagtgctgggattaaaggcctgagccaccgcgcccagcctcgaatgaacttattatgtggttttgctcactctattgaatgtttacctttaataaccattacgtgcataagctagaattcctttcataatttcactattattaatatactggatatatatgtattggatataggtaaaatattaagcatgcaatttttttcttcatatttatatattgtattggatatgtgttttggatataggtaaaaatattaggcatgcaatttttttcttcatatttaatatactggatatatgttttagagataggtaaaaacattaagcatgcattttttttcttcagtagtttgctgctgctctatgaagatttccagacactgatctcatagacattcatacattaccccagagtcctcttatcctaggagaaagtatctcataatccacacttaaatgttaatgacataatacattattactcccagaagtgtttgtagtttaaaagtgcttcctatggatgaaaatgcttaactcaaaagaatgaattaatttccagtgctagaattttattcaccttgtcgcctgtgtaaacgatagattttaaggaaataggatgatactctctcaaccctaaaatcacactggacaggcaggcttccaagagcacctctgaatctttagcatctccagagtggtgttaacagggggaatatattctgtttccttaggctgctgctctaagcactttgcccttttggaataaatttgttcttcttatactgcctcctaataatctgcacggcagagaaatgtggtttatctcatggtgcttagcctgactcacaaactacttaagaatttctttttcacatgtgtagtcatttaatatttaaactagtttccatgaaccagttataaatatgagtgaatacttattagctgacttgacatctaaaaggatgtctttctactgaaagcaaaatattgtaagagtcagatgtttgaactctttttagtctagattactcaagaggaaacaaacagcaagatcccatttaattgcttgttattttgaagaaggaaatgttatgttatttttcttcccctaagggccgtgtccagggcagtatcattttggtgtttttataggtctgtgagatatttccaatgtttcgaaactaaaaaacaagtgagattgacataaatgtatctggacagtgtaatgtttcaaagcttatccaagtagttgttctttcagattgaagacttggtattatttgtactaaagtcctattgatataattagttacattaaaaattttaaactaatggatgagaaggacatacctgaatccaggcatggattatgtagatgtgaaatgttaatacatatctgtatatgtgtaattgtgtgtgtgtgtatgcttaagtgtgtttaagttactatcaagtattctaaagggggatgagtcacacatacagacatagcatagaaactgagtttgggcttttgtgttggtctgcctgtgtctgaggctttaccatgtactaactgtgatactgagcaaggcacttctgtgccccagtttcctcatctgtaaactagagataaaagtagtacctgccttttagagttatgcttatcaattgaattaatgcatgcaaagaacttacaacaacgtttgacacatatatggatttaataagtgttattgtttttgtaaattattattaaatattggtgacacagttgattcagagagagaaaagaattaccttttaaaaaagtgactattttgaagccaaagatattagttaatttagcagattgaagtcataaggttgtttatcattaagagactatggtataaagatggacacaggtaggtagtagtttattctttataatataccttacattaccaatttttgactatttttaaagtctcctttctcctgaccgtatgtttatgaaaatgttctttactttgaaacctggctgggtttagaaaatatatgtcctttgtctattttgtgatagacttcaattttgtctaatcagtgtttgaaagaaatggcacttgtatggacttccttccaagaaaaacattgggtgtttcaggaagtggtcttggtgagtcagagcatagtactttttcctctgagtcagttttgaacctccttgatataaataggcatgcttttaccaaaagttctgcttttcacatgttaaaatcatcattgatacatggctacactaagagcagtgccttcattggtttttctgctcagttggcattgaggctcttttatctaattgtgactgtagaaattctgtggaataaatttctttttaaattttcaatttaattctatacttctaaattagtttctgttttcacaccaattttgcttcagaaaggagtggagtcaggtgaccagttatgtaaattttagaggaatttatattggtgataatatacactttaatcattagaattctatgacttctcttttagcccacacatataactctttatagcacaatttcagttcagggattattttgcaaaagactgtactagtttgccacacctcagaattgtttagaagatagaaaagaatacgttagagtggttcttcataaccacattaaaaaacattaaacatgataaataattgccaattgactagatattgttaacgttgagttggttagggaagagtttctttttttgttgttgttgtttttgagatggagtctcattctgtcccccaggctgcagtgcagaggcatgatctcagctcactgcaacttccgcctcctgtgttcaaacaattcttgtgcctcagcctccagagtagctacgactacacgttgtgtagcaccacgtccggctaatgtttgtgtttttagtagagatggggtttcaccatgttggccaggctggtcttgaactcctgacctcatgatctgcccactttagcctcccaaagtgctggcattacaggcgtgagccaccgcacctggcctaagggaagacttttaaaaaggggtgggaattgaggaattgagaaattgctagatgggaagtataaagtagtggaaagggcatttagggtaagaatagacacttaaagttgggtcagtcaagatatgctcaggacagtggtgggaatgagggtttatatgtaggagtatttgagagaatatggattactggaaaaattatgtaagccaaaattatggtcgagcctcgaatggtacactaaagttgtatgtgtgactacatagttggtaacattgtttaattgtcatatatttctcttgagttgtaattggttgaatacaactggtttttagtgaatttcattttataactagtatttaaagaaaacttctctatttctcttaaatatatgatcctgcaggaaaataaaggaactgagagatatagatgtcaaatgatctgtgtgtgcttttgcatataatcctcataacaatcattctcattttacaggtgagtaaaccgaagctgagataggataatgacttgtctaaggtcacagagagatgttagtcaggatttacacttagggctgctcatcttcatactattttcttttcactatggcaaaataccacaataaaagctctgggacatactcagtaagtttttattatttccaatagctgtgaaaaagcaactcaaaggtatttttcttctgaacagaagtattattttcttttaggaataggtctttggactctaggaaactgccttgtgggtaagcttgctctcctcctcttggggagcagttttctgtaaggtttgcaggggcagtcacatcggtggagggatcatttgtaggttgtggtgagccatgctgtggatcatctgtcctttgcccatttatattagtagattgatggtcatttacattttttcaaatctgaagcatctgggccttgattagttggaatctttgattttcattcttgacatatacaacaattacaagaatatgctacattgttttattctatttccttcataatggggaagcagtcatgtggctcttggcaaaactgaccttgcctgaggtttcaacagaggcagttgagattaaacaccattcttgtaaacactgaatctcctatctcctaaatttcaaactggcatcctggaaaaatttctttgttaggatctggaattgaacagctcagttcttaggagggcagggaaagtcatcatgttttccccagctaaatagtttgaatgtgctactatgtgccggtacgtgctattcctggggcttcttagcagctaaattttttttttttttttaaagaggatgaagatttatttttccactccatttgaggaaaataaggaagttggctggcaataagagaggtcaagatggagaggctggaggagagagatgtctgtttactgtgtggatgaggttaacttaaagagcgggggttggggagtctagttgacactgcttgttcttttccttgagtagttctcgttagaagctagagctgctgaattttttctgttttaacttacttggttaaaatatttattagtaagattttaaaattacttttagaacattgttttattctgtcttttcttataagaagatttgagataaacatctccatttggccaagtaataaaatattcacaggcataattttttataaaatattttagaaaattgtagagtttttccatttttcctttattaaacagtttcagaaagccttttaaaatacatatttctttcataatcattcatatgtccccatgctttgtaaaacatatgttgcctcaaagttggatataagagtgtcaattctagttttattgatagcttttatacaactggaaatatgttcccatagagaaatttctgtaatagacatgaacttcatggaacaaagtcaaggtgatgccatgctcttttggaatttggtgattcttttgtcactttagtgtccattgtctttattctggtactatcttggcctttatattgatcctatttctaataatcctgatcatctactgcttggactccctaaactttcagaatccagttccctttttttcttacttatcagtaaagctagattatcagttcttttttatacagatgtaggactatcatctgtaatttttggcaaaagaagaaaaaaatccatgtagttctttttagaggtcatgtgagcatgtgatttttgggtaaaaaactctagccattattttcctctatgtggcaaagtggttgaattttatcccacatctactattaattacctctttgacagtgaacatgttattaaactctgtacctagcttattcatctgtaaagtgggaatggtaattgttcctacttcatgaggcagttgtgacaattaaaagaaaatgacacatgtaaagcagtgcctgctatgccgtgttttctagatgtgagccattgccgctgctgctgctgttctgcctcttcctcttcctgctgtcactgctattggcagtttgtaatagtttagttttccttcatgccctgattttgtaccaccatttggcttagaatgggggacagcagttatgccatgtaagtgatatccagtttatttaatcaagagctggagttaatttggggggttatttagacattttaatcagtttgtgcttgtccctcaagttttcccttcttcagtctataggccattttcccaaatcagtttgtgcttgtccctcaagttttcccttcttcagtctataggccattttcccagttggttagagatgggaactgtgggaatagaaagaaagaaatgcaaatgctggccttacgataattccctcttcaaatctcctcttctttctgacctaaaatagcttacttacccaaacaaatctatctgaaattcccaaacaaaaatctatataatgtgatccgggaacatgaaggttctttggtcactctcccttccctgctaatccaaacaccttttttcacttattaattcactataaagtggtgtgtttctgcttggttttaattccacatgcccgagtttaggaatgtaattcctggcaaatatttttgggggtttatagattgacactggcctcaaagtggacatgtaaaaaaagtcccatttcttcccaagtggaatagtagttcaggtgtttttctctgaccttctgattcatcaagtccatgtttttgtttttttatttgagacagagtctcgctctgtcgccaggctggagttcaatggtgcgatcttggctcactgcaacctccgcctcctgggttcaagcaattcttctgccttagcctcccgagtagctgggattacaggtatatgtcatcatgcccagctaattttttgtatttttagtaaaaatggggtttcacgatgctggccaggctggtcttgaactcctgacctcgtgatctgcctgccttggcctcccaaagtgctgggattacagttgtgagccactgcacccggccaagtccatgttcttaaacttggaaagtctctaaagttagtgttttatagattttactgttttatttttgtgtttcttcatccctactgtcttttattttgcttatgttcaaactgctacctgaaatataataaataatagcattctcattcagaattatttttacatattttttgtcaacagagtactgtttcaccttgtcttgaaacattaaaaacactttcaataaatgcataaattctttgttttaaaggtagactaattatcctggattttaaatagagaaatcctgagagaacattttcagaatgaatctctcagtcccatacttttgagaagttcatagctaggtttgatgcagtctgtgtttgtatccttataaacgctatctgttttatttttactttttaataaattaacagaagttgtcatatttattctttttgcaacctccgcctcctgggctcaagtgattctcctgtctcagcctcccgagtagctgggattacaggtgcctgccaccatgtctggctgatttttatatttttggtagagatggggtttcgccattttggccaggctggtctcaaactcctgacctcaggtgatccacccacctcggcctcccaaagtgctgggattataggtgtgggccaccatgccctgcctcattttcttatttcatgctctcctccctctagattgtaagctccatgaaggtaggaaccctgtctgttttgctaaccatgcactcaatatgtagagctaccctgtctagtgtggtagctgttagtctatatgtggttattaacatttaaatgtaaactaatttatatgtaataaaacttaaaattcagtttcttagtggcactagccacatttcaagtgctcaacacttgtgctcagctactgtattgagcagtgctaatatagtgcatttctattattctaggaagttgtatgggactgtgcgagagcactgatgggcacattctggttacgtagtaattatttgttaaatgagcgaatgaatgaagtagtactcagattggcaggtgccaattaatgttgaatgaatcttgtttgaataatcatgtttaaaagttattttagtttttaattaatccatgttgacatttccccagccaacttcaaaatactggatttatcattagtaaaaggaaagtatataatagtggttaaaagcacaacttgttgctgatgtcatggccaaattacctttacttataactctaatttaaagtctcagattctcattaaaatgagaataagaagttctttttacctcttaataagaagtaagataatgcatgtaaagtgcttgcacagtggctgacataataaaatacttaatgagcattatttttacaataatgaaatagtgaaatatgtctaaatttacctcattcgtgggtgatttcatggttatgaaaaaatttactgctggttttgagaacttctattataatttcacaattttcaaaggtaatgctattcacagtcaaagcttatatttactgacttttaaatatgaaatataataggctcaattattttttccattggaattaacttttcttcctttattttttaatgactatgtaagcaggtaaactctcaagaagagagtttcatactacttttataggcaacttgaattttaaaactaatgtacaaatatctctgcttttgttttggagtagtccacgaataatttgttcccagctgtatcaatttaaatgggcttctctttgggaaaaaattaataaagaatggataaagtagtggttatttacctaaggatgaattccaggttttatttaggcacctaactctgttatgatttaatttctagaaaagcaattaaagcaagagcttttcgtgaacagtaatgtctgatttaactggggttattgcctcacgtccatgctttagcgtattgttttttctctgggatttgaaaacagaatttgttgttataataacaataggtagttaaacatatactaccaaaataccagctgactttatcaaatgtaaatttccttcatttttttttgtgttactttcactctggttgttatggtacctttgtttttagtataaacttgtactcatatttcatagtccacctgaacctctcaagttcacattagaggtgacttgaatttttcatctgggtttttcattgacaaatatttcttaatgtttagacaatgaaaatatgctacagaaaaatggcagactaagcatatacatttgtttcattttttgaaaaattttacttgaagttctgggatacatgtgctcaatgtgcaggtttgttacataggtatacgtgttccattgtggtttgctgcccctgtcaacccatcacctaggtgttaagacccgcatgcattagctatttgtcctgatgctctccctcctcttgccccacctccatctgacaggccttggtgtgtattttttcccctccctgtgtccatgtgttctcattgttcagctctcagttatgagtgagaatatgcagtgtttggttttctgttcctgtgttagtttcctgaggatgatggcttccagcttcatccacgtccctgcaaaggacatgttttcattcctttttatggctgcatagtattccatggtggtatatgcatttatttcacttcctccaaataaaataacagtaaagggatttttaaatgcagaaagccagtgagacaaagggactctataaagcctgtggataattgtgattaacctagaagtccttacatgctgaaacctaagctactattgagagacattgagaagcaaccttattttcatttcagaacctccaactgactcaacagtgagagtgaggctaagaatagtaggatttattagtcatgtgtttaaagtgaacttggatcccagatgcctcctcacactccagtaaaaccagtagtttattctgtggagaatgtgaactagagaactcggttggggataccaaggtacagacagagggtgaaagatgaaatgaaatgcttagtaaacagtaagacaaccctggctgacttcttccacttattgccaaagttttggcagtcagctttacattctctaaacatggaatgggaagatacttccttggagaacctgactgatctatgcaaaagaccgatagacactgatggctggggtctgccagcaggacttctgtgcagtgaagcccacttgttcacaagccccacccatggacactgactttcttgccacctttttagggcttcatcttcaatatgagtaataaccagtaatcacctgatatttaaagcaattcagaagccaaaacaaacctagcgaaaacaaggaaattgtcataaagagacaatgaagggagaagaaaacttaaaaatattatcatggatattctcagaaagatcagagaatatactgtaatcagaaaataagtatagacactaaaagaaaaggaagctttaggttctaaaaatgtactcctgaaaaatggaactgatagaagaaataagaaactcaaaatgttttttgaatataaagaagaggaagctacccagaaagtagaaaaaaaaattacaaaatgaaaaacaaaagagaaaatacaaaagtagagacttagaccaggaggtcctactctgagcaactgaattttttagaaaaaggaaaagtatatatagcaaggaaactatcaaagaaatagcaaaagaaaatttcccggactttaggaaaatgattttcaagtttgaaaaggcctattgtgtttccaatatgctgaatttttcaaaaaacacccatactaatgtatagcaccataacatttcagaacatcaggggtaaaaatgaagatcctagactccagacagaagaaaacagacaggctctatacaaaaaattgggagtcagagtggcccctaacattcagcaggggtcattgaagacagaaccacaagggcttcaaaattatggggcaaaaaaaaaaaaaaaaaaaaaaaaccaaacctctttcaatctacaatttgaaaccaagacaaacggtccatcatgtgtaaaggtaaaataaacacatttttcatcatatacagtttcaaaaatgtacatttctaatgctctttcttaggaagtccctgaagtatgtgccctaccaaaataaaaaagtaaaagcatggaaagagggaggtccaggatccaggaagtaaggctccaagacagggggaacgtgaaggggatacacaaggtggtgaggaatgtggatcccgtgatgaaagctcttcggagccttagagagtaatcagttcagagtggagcagtcatatatctgggaaagaagcctgcagaaagacagaaatgttagagtaatgatagaatgggtggtgcttcaatgtattgaaaggagggctccacttctggtggtgtaaagtaataaaattaacgagggggacataggatcactaagagttggggggaaagataattattaacaaacagaagacaaatatataaaaatggaagggtattcttagtatactgtgaatagcatttacatagattcaataagtaaacactgaattttagtctcacaaaaatgtggtgtatctgtaattcgtcctctgtgatatgattctcacttcatctccaacctcatccctcataacttcctgccaaactgctgacagtttcctaagtgtccaaagccatctcctgcctttgctcttctcttttgccttctggcttactcagctcctgcatcacagcctgtgaaggaaggcagttatgaaccgaatgtctcccgcttccagccctaggcgcaggccttgcatactgtctttctacttgccacattgtactataaatgatccttttgatgtctctctgccccattatactatatatttctaaaagtcattatctttcttttttgttaatttttttttattggtagaaatgggaccttactatgttgaccaggctggtcttgaattcctggcctcaagcaatacccccaccttgacttcccaaagtgttgggattacaggcatagtaaatcactgtgcccagcctctcttgccttttttggtctagtcattctttcagggagattttatcctctagatccacccctaatctagttgcccttgaacttcacactttgctgtcttctattgcctataatgtggtcttttcttaaagatgctttttctttcccctaaaatttctttataagcagtgaagcttcaaggaaagtttgtcctagcttttctgtgagttggatgaggtgctagagatttgttttcttagtaggattacctactgacaatctggcttgttttttttatattcagccaagtgtagacagttagtggaactgacttttttgtttggtcttgactcttctttattgcatcactttctagcagcctattaggactgcctctattcttgaagataaatgaaaaatactattttgaaaagagtgcatttttatctttgtgggcaaaatgttaagaggcataggataataggaagaaggaacagttaagaattgagggttttaacttacctgcttagtcgtgaacttttcatagacataaagttatacattttgctcttgatacagtctgatacctagaaaagtatacaacgtattctgttagaaagcaattacattcccccatataatcattctgctggccattggatctgtaaaaccatgtattactaaaatagagcagacaaattgaaacaatggataatccttgataagatataatacctctgtgttcccttatcaaaacaatcaatgttagaatattatggcaggcaggaagagaggaagttgagataagaaatagtgactatcaataaaatatatgagaagtagtttgggggtagtgtaagtatgtgcattataatacactagaaagatttagttaacctttaaaaaaatagaattcttatgctttttaaagagtcccatgtggtttaacaattaagtttttacttgtagtaatattcgggagatgtatttatgatttagagaagtgggatgaatcagtacagcagttgcctaaagataccattttccacttcgtatgttgtaagcatttataaagatatattgtacactttagaaaagattgatcctcttaaggagctatacggaaatgcagtgagtcacctgcagtattttgtttgctgcttaatgtcctttgctctaggtgatgcagaggaaggtaatcatgtggtgacagggtggttaaatattaaaatattatatctcatccttgggttacagctcttcttgctgtacctgtaatgttttatgatttactatttttagatgccatttaatacaccagaatgaaatttgaattcaggcgtttcagtctcattaaagatgatattaccaatgtttctcttctcctggtccacctccttccccaactcccagcctctgctaactaccatcctactttctacttccgtgaatccaacttttttagagtctgcgtataagtgaaatctctgtgcctggcttatttcacttaacaatgggtacacagtttcagttaggagaaataagttctggtgaccaattgcacagcacagtgactatagttaatactaatgttttgcgtatttcaaaatagctaacagagagggttttaaatgttcttaccacaaagaaatgataaatatttgaggtgttggatatgctaattagcctgatttaatcatttcatagttatacatgtatcaaagcactacattgtacactataaatatatacaattattatttgtcaattaaaaacaaaacaaaacttttaaaaaagatgtttttagagtatgtttttccatcttcccacccagctggtttatgtcaggccctggtaggtctttttctgtttgcttttgtaaagtatgttgagctgtactaatttagcatgtggtgctgttatggaaaaaggatatttagcattaaaaatatatttaatcctagttttctcagtaaatactcttcctttccaaaaactagcatttttaataccttattttaagaagagttgattagaataaagaatataattgcacatccgagcaaataaaactgaaaacttttggcaagcacacagtggtcaaactatcacacaatggtgtaacttactgaaaaaaaaaaagggatataagtcagtcagatcagagtttgagttctgcttctaattttagcttcttctgttactgaaacaagaaaagttcctttgtccccctcgcagggcatgcaatgtcggtgtggcttgtttcttcagtgccccgctgctcagacctctaggggagcatgcagactggcaggctgtgaggttccaatcccacagcagtgtctaggagtgaatgtttacagatgaagcccccgtgggcgagtgttacagggtgctcttttagttttgctgtctatagacagcttgtgttaaccagctcaattagatcctctaccttattgcaaggacagggggttttctgtatcctggggttattgccttggcgtatgggaagaatcggatcacacgtgggcttagagaatgagtgcagggttttattgagtggaggtagctctcagcagatgggggagccacaagggagaatggttttcccctggagtccggctgcccctgctaaactccaaattccgcgtcattctgctggttagtggcctgcagcatgctagtgcctgttggtgtgttcctctgccgatgtgcccctctcaatgtccagctgcttatgtgcctgcctgctaggttctcagggtgtttataggcacaaaatgggggcgtggcaagccaggctggtcttgggaaatgcaacatttgggcaggaaaacaaaaatgcctgtcctcatctaggtccatgggggtggagccctaaccagtgaccccgccttcctctacccagcacttcctttccccacttctgtattatttaaagggaccactcccttcccttccgtatcattaccacttaggcaaatgacttaaccgccttgaggctgtcatctcacccataaaatagagccaataactagctgataatgttgttttaaggataaagtgaggtgatatttgtaaaatgtcttatgaactgggggctcattaaatgttttctttccctttctcctttgtgttcacttctgcctatgattttaccttagatgcaaataagacattacttttcagtcattcatggtactatgtgattttattaagcttcaaaataccacacaaatggcagtctgtttgtttcaatttcttcatctataaaatgagaatgaagaatagtacttccttcaaaaactaatgtcaagattaagacaatagaatgcatttagcatgatacctgatgcagagttaaaactcaataaatagaagtgattctttttaaaattagcatagtttcccaagtcagtaaaatatcaaaacattttgaactgagatattagtaatttccatgtatagtatagcatccagtagtacatgtgtgctgatgatgtcatcatagcaactcagggaatagacaagaactggagggaaatataatagtagtattagaatatgtctatgcctcttttctttattagcccttcctatgaacaccatcacaatagcaaacataattagtgctaaagtagttctttctaaagttgcatattaaattttgttataagtagttttcttcagccacttgttaaccaaacaacattctgatttgatcatagacttttcccaaaattatgttctgatttataaacagcttaagaattttgtcataaagaaagaggaactaagttaactattttaagtgattttattgtgttgacttaaaggcataaaactactccatttacattgatactggtgttgagaaaatactgttcttctatatggtctagaaattgtgataccttcacaggcattaaccacattattgttacaagaacttaatatccttattagttttttgagtttattcacacataaaaattctttgttaattgatatttgaaaaaatagcatagaaaaatacatggtgccgtctttaccaatggtactggaaagagatattaaaacgtgattgctctagaagacattgcaggagacaaaatgtgtgatgatttaagaggtttaaagaagattttttttttaatgtttgaaacaaaatcattgttagacaatgtcacaaagtattggtggaaattaagtttcactgatcttttagtgaaaatcctaagtaatgataataccccctcccacttggttgtaacttagactgggagacataaattaaattaaattgaaacctagacatagatgtttcaatatcatatccaaacacacaaaaacacacttctgtagataaaaaaatctgtgatattttctgagaacacaagtcatttgaaggacagttaaatatgcagagagttactaattatgtggcagcaagattgggtaagtagttttctaatattgagtcatgactacatactcatctaccaatttgaaaattgatatgagatgcaagcaagagtaaagaaaaggaatctaaaacttatatttgaggatcttaaaaccttctgatacaaatttaatttgctgagttaaccttatagccttgtttatttcttcttagtcattttttatatattccatttcctttctttttgaaaattatagtgtgttacatttttcattcgcttaacttagatcttaaatttatcatttgtatccttctaattgccaaagaattttattttctgtagaaaataaagataaaattatagtaactacgacttactaaaagtgttttcataaggaaattgatgctgttacttaaaatcaaatatagctgacccttgagcaaatgcagggattggggtgctgacccccactcagtcaaaaatctgtgtataactttgactcctctaaaacatatactaatagcctactgtctacctaagatcatataaatagttgattaacgtattttgtatatgtattatatattctaaaataaagtaagctagagaaaatacttaagaaggagaaaatatgttcactattcatgaaatagaagtggatcatcatgaaggtcttcatccttgtcttcatgttgagtaggctgagggagaagaagtggaggggtcggttttgctgtctctgggtggcagaggtggaagaaaatttgcttgtaagtggactctgcagttcaccctcctcttgttcaggagccaactgtaggtggtagctattatgatggctttagtgtatactttcagcagaattatgtagttagtgtgattaactgcatttgtgagtcattaaacttaaaagcgattaaaaaaacctttgtctctttagtttttaggttgctttaacagtttataaaaataaaaacacttaatttttcagttagagttgatcattattttaaattgtgtatatgggtataaactgggtatgtcttaaaagcctaatggaaaaaaagacaaacatttgtaattgtttcctccgcatggtatacactgcaatcgctcaaattgggtatttgaaagcctccatatttgccacatgagccgccgtgataagtgaaactgtgattgccaaatgacaaaaagtttctatatttaaaattcaatttagcaaattgccattttctatccccttttctaatgttctcttattctaacagatcactattttaaaacaaaagagagaccatgcatttatttgattgtcatgaagaattaaacatgaaaagatgagatgctgtggctatcacttttcattaaaaccagctgctgtggttttaaaacgcaaaccagatcaaaatcagcacaaaccctgggggtttaatttatatactgaatgaaccagcttgctttgaaagaacacttctttttttttcagttttggaagaaacttgcacatctatctcatttcatctttacactagcactgtgagctcggaagacgaagaattatctctattttactgacgaggacattgagacagaggccagaggcttaattgactttcctagcccagttagtgccaggaatagtgttaaaattccagactatctctagttccataatgttattccaggcctctgttctggcccaaattatagaacgtagcaatgatgtgctgcagttggatccttagccaatcgtgaagaatttaggaattttgtaagctgctgttaaaccactgactgcttgaaattggccatggtgggaatatttataccatggaaaacaataagcactacaaatcaggccctctgccttgtcccaccctgagaattggtttaccagcacaccactgattgtatccaagtgtaaactgaagaaggaaaacaacaaaaatggagcacagcaatgtaatatacatgtaattttataagtacatgcatgtatagggcagaggccgatctttctttgcttcttaatttataaatgtgcttttaagcagtggataggaaagcttaaattaaagtccagtgttttgagggccattcttacccatttttttaagaactaggtcaagtcccagcccttccagaaagtaatgacagtcttcatggccttttccctctccgaacttctagcagatttaaaatagagctacatatgttgggacttaattccttactatttgttttacatgaattaactttgtttccctaagaatacaataaactctttgaagagtgggacatggatttccttctttctttctttgaataaatatttaatgaacacctattctgtgcctggtacccttcttcttatttgaaaagcagaagtcatcaaacaaaaattcaagccttttgggggctaagagtttagtgaagagtcaggtattaatttaagtaaaggaaaagttatgaatgtgataaatgctttgaaaaattgtctatagtatggagagtgtctgatagtgggattttatctatccaggacggtcagtaaaatcttcccctgaggacattgtgattgaactgagatctgaagaatgagacagaattaactcgaagtgaccagatcttgaatattatttctttatgtaggctttctgtgctcttccaatcagagttaagttctgttattatttgcatccgtgttatgatgaatgttccctttgtaatgataagtacaacttaaaattttacacttattcattatctgtttccccccactagactgttggccctatagttgggaccatgtctgtttggttcactttggtggtcccaatatccatcacaggacctgaaacttaataatcaatatttgttcatgctttcacccccttggcccataaagctggggtatgtcctgcctaactcacagttattgagaggacatagtaatataatatatttgaaaagacaaaattcagaaaactaaggcaggatccaggatagcttagtgacacaaacccggagaggaccaaatatccaggagtgaaaagaaacaaattgggtacagcaatgttatctagaagaaagaaaaggccattccatttggtaaagaggaagttttactaattatttgtcttgtttgaaggaagtttgttcaatctgtaaaatagatttaaaaatggtttttgaggttaaatatctgatattgatttttaaagttattttcttgtgaaaagtaaaagaagtgtgtaaatgaaaagtttcttgaaaaaaggatgtgtccatgtgcatttgtgcatttgacaaagcacatgttgtcaaatgtgctttgaaggaaagaagaaataaaagaaggaagggaggaaagaaaaccacttgtaggcaaaaagactgcaaggtaactgttacctggttctctgtaaatgatagggctctgggtgatactttttgcttttgtacttttctgtatttctcaactttttaaattaaatgagtttatattacttttataatggaatagtaaacaaaataacatctcataaaattgatagttgattatgagtttgggcagaatgtagaattatgtctatatgctttgagaactcagaactatattttagatttttcttttgttcacctaaatctgcttataattttagcatattaattttaaatgccagttggatctttgtttaaatgttcatctatacctctggggcctgagctctttgagggtggagatctttatctttgcatttctactataattcctggcagcaacacatatttgttgaatgaataacttttgaaactgagatgtcttgacctttttattgcctttaatctatgtgtctttctttttttagaacacacaagtgaaagacacaatgaatggtcatatttctaatcatcccagtagttttggaatgtacccatctcagatgaagtaagttgaaaagtttatatttaatatgttttgggggaatttgatttggtgattttaattgttttatatttttagtgaaaagattactttcgttgtgtagttcagtagttcattcctcattaatatgtaatatctttgttacaacacatgttattaaaagtttactatgtctgataagaataagatggtaaagtaaatagccttatgataatgatattgatctcacacttggaagatgtttctgtttcattctagtactttatgcattcttgcttttcatggttgaatatataatctacttcagagctttgaatttctgtggtgcattctgttattgttatttataaaatattggcatttgagaagggttaaatgtcatttagtataaactaatcaagttatttaccactgtgtaaaactagaaaagatcaggcaaactaacaaaatatttccagtgggtccaggtataacttgaaatcataaccctgacttaattggccattgtcttatgtattacgattaatgttattatttgacattggccattgtggtatatattttactcatcattttttcataacaggtaatgtttactattttgagagaataaaataaaatgtaattcttaatcatgatgctaaaagccctcaatctgccacagcttctccagtcattcgtctattctgggaatgttacattaactgcatctttccacagacactgtgctatttcttgagtcagttccacgtaccttttcctcacttgattctctgcctgtttatagagcttctttccattcatttagattctgcttgtgtcaatgcggtagtaaagttttcttagatatgttgatgaagagttagtccttctttgattttacatgtcatatctattagttttacccagatatcacattctattataattattttatgtacttattttattgacagcaccctgtttccccctcccatagtccttattcttctaggttttgggtcttacaaaaatgttcactgaaaaaatgagtaaaattcaaataaagcactatttatttcacataacatattagtagcaagaggttagatagcctcctgcatagctgggattacaggtgcctgccaccatgcctagctaattttttttttttttttttttttttttgagacagagtctcgctctgtcaccaggctggagtgcaatagcgcgatcttggctcactgcaacctccacctcccgggttcatgcgattctcctgcctcagcctcccgagtagctgggattacaggcatgcgccacaacgcccggctaattttgtattttcggtagagatggggtttctccatgttggtcaggctggtcacgaactcctgacctcaggtgatgtgcccacctcggcctcccaatgtgctgggattataggcgtgagccaccgtgcctggccatcagtatgttcttttaaacacgtggtgattatagtgcattggaatttttattttctagttgagtttctgttacttatattggactttaacccaacacaatgacctttttatattattattattattattattattattattacagtggctacggatcatcacctaccttttcccagacggacagagaacatggttcaaaaacaagtgcaaaggccctttatggtaggtttgtttatttgatagggtataattttgtttctaaccactttttacaaattacattttcaaactcatggtttgaacccacacatttaatattgtttggaatgaggcagtgatagctaaataaggattattttaaagaagagtttttataaaaactaccaaagccatgaactctgcttgctgttatgcattttagaactacagatgaaatgtattgcagtgctttcaaaagtcctatgcatggtgccaatgccctaggtggcttttcccatttactacttgtaataatgtttgttgatctttgtgactgatctagttggtggtgggctgacaggtgacagaacgttttcctgatagctcttgaattttggggggtattattacagtatgtctaatagatgttatataatttctttatgcactgcaaaatgattatgctttttccctgatcttacttccagtgccctctctggattgtctcacatatacatactattttttacacttcagatacaaaatagaagtcataagtaacaagaagtcgaggactcctgaagtttgccacatatgtttaggatggcatttatttgtatagggtctggatggccacttttattgtataacaataaagaatgagaataatattgtggttaatagcaaagactctggaaccagacttcctaggttcaaattcagttatttattatctgagtgatcttgggcaaattaatttacctgcgtgtgcctaattttgcttatctgtgtaatgggggtatctcacagggttgaaatgagcattaaataagttagtacatgcaaaatacttagaactgttcttggcaagtagaaaacactgtatgtgtttgctattattattgttgatattatcgatattatgtgctataggaaccaacagcattttctaaattgtgaaattctttttttacattatctagatctgcaacttcttggctgttgtaagaataaacaattctaaggttttgtgattgtttttctacctatgttagtgaattggcattatcactgaaatcagacattcataaaatggatttaataccatacatgcctatactttttatagccttattaatctgattgttgttggtttcagtttattaagtattgtgacattattaccatggtctaatagttatgaattgtagatctagagaatgtattcaataaatattttgtcattaatatgtgtacagaacaggaccaaaaatatatgatccctgactttaagggacttaaagtctggagaataacttgaagataacagaaaaagattttttggataagaataaaataattcagtctttcatttctagacagatatttattaagtgcagtatttattaagtatgctatgccatgatcttcatagtctttatttctatgtgctttcattcatttcaaagatgactaagagaaggctgttgcctatgtgccattttggtgcaatagactagtaaacacattgttataataaagggctaaatgtgcttagatagtagtgtgtaggaggtgcactggtgagggttgatcagaaaggatttaatagaggaattgagccttgagctgagctgtgaaagttatattgtgttcttcagcatttcaggggtcggaggatgctacagacagtatgaaacccttttaagcaggactatcaatgctgtgaaggtggcccatatttgtcttgttcacttcaggattccctgtgcttactggcatagtggctagtatataatttatgctcagaaaatacttgcagaatgagtgtaatgaattaatcagatgcaagcaatttggtgttaactggagagtgcatagtggtgcattgggaaataagactgaaaaaatgaacgtagaccacattgggaagaattatactaaggaatttaggcattgtttacaatgaatgagcagcctttgatgttttttactcaggatagtaataggtcagatttgttctggctcactctggtagtaatattgaggatgaatttgatgaatatggatggaaataagtgaatcagagatttaagtaatatggcaaattagacacctaatagtagcctaaagacttttaataaggagaaagagtattaatcctgtcagaaataccacagatctaaaatctaatttcagagagctaagaaagaaataagaatagaaaatagaactcacctgtaaattttaatgtttatgttgtattagaagcaactttgtaaaatcttagatccaaggaatgaaaaatcttacttttttttttttttttttttttggagacagagtctcactctgttgcccaagctagagtgcattggtgcaatctcggctcactgcagcctccgcctccagggttcaagcgattctcttgcctcagcctccagagtagcagggactataggtgcatgccaccacgcccagctaattttttcatttttagtagagacagggttgcttacacctgtgatcccagcactttgggaggccaaggcagatggattacctcaggtcaggagtttgagaccagcctagaaaatctttagcttttaagcagttaatttttattttcccccttttacatataaagcaaagtgaggcccccttttcaagttagatgattatcaaagtcacataactttaaacttgataccactgtaacaattttgtatactgtaatgaaaatgagcagtgtataggtacaatgagatagaaataaatggattgaaaggggcaaatccaagaagcatttatagggaagagagaagtcttagcaatggattgggcttagaagtaagatggctttaaattgcagatgtggtttctttcctctttgtttctaatacccaccactgtctctcaacacactgcacaaagacatacacacagtaccttccctctgagagttctcagaaaatgcctatggaatgaatggacagatggatggatgacaagggagaaatatgttcatgttttgaagatagctttgcaataaacagattctagttgaagtttttttttaggtagctttgggagtgtttagcatcccagtctgcatagttttaacttatgtatagcatctgttatcacatgctagaagtatgcatgatataacaacatggaaaagagacaggcttgagatccggccacatgggaaaaagcagccctaaatattcagaagggagatgaatctgaatgatttggtgtaaaggtaaggaatgcagcccccgagtttcacagcgcataagctaatgtgcacacacatgatcctttgtcaccaagaagagattatatgtatcttcaaaacatgaacatatttctcccttgtcattcatccatctgtccattcattccacaggcattttctgagaactctcagagggagggcactatgtgtgtgttttgtgtggtgtgttgagagacagtggtgggtattagacacaaagaagaaagaaaccacatctgcaacttaaacagtgtgtgctggcagtgtctcttcttaactggaaagttagtaaagaagagatttatgatataatttgttttctcacagttgatgcatcttatgtaaaatttatccttttacaattttaaacgagttgaaatcatgttccaagaattaatttgccttcatgggtggtacatgaacatctttgtaataggaggatactgttttgtgcactggaacatgaatgttcacactgttttttacgcactgaccacagtctagatactctgtctgaagtttcatgcagagtttttcatgagaacacttttcaggtctgacactatagtgggcctcctgggttgcttctactgaatgtgctcggaaaggcagcaggggttttggaggccagaggatctgaatcatggtactgctaccaaatggctgctgtctttcacaaatgattggccccagtttcctcatttataaaataaaaatgataataattctgtggtaagtttatatgagaaaacagaagtaatgacgccatcatgggaatggggagtggtactggagagtcactttctgtcctgggtcctcagattcatcaagattctcaaatgtaatattttgatattacctccaaatgatgttagacaattaattatagtgatattttgacagaatcaagaggtgactttcattatatattttaaaacttatattccatatgtcactccctataatgctctagaaatattttttataagtggtataattgtattgtgaactatgcttgtatatgacaataaatttgcttatttgaggacatattaatttattcaaggaaaatggtgaaaatatgctgccattttaataacttgattttgccatttttaaattaccatacaagaaatttctgagccagcatgtgaaagactctgcatcattattgtcactgacaccgtaacacttacttaggaagataaatattaatttctctctcctccagttataacagtaacattttacttagctactgttatcagaatactggaaattttatatttttttccaactaggctgtttgtcaaagcctttaagcactaaaatttaaaattgtttttaagggaaataattgtaaagtatattaaatattcccttcgcttgggtgtggcagctgtaatctcttcttggggacaaaggatcatgcatatgcacattagcttatgcactgtgaaactcagggactgcactccttacctttacaccaaatcattcagattcatctcctttttgaatatttagggctgctttttccatgtgactgggtctcaagcctgtcccttttccatgttgttataacacgtgagcttctagcatggcttctggtatctgtaggctgggaaactagataaaaaatgttcttagtgaataggttctaagtggggacttgagagtcttttttttttttttttttttttttttgagatggagtcttgccctgtcgcccaggctggagtgcagtggcgcaatctcggctcactcctgggttcacgccattctcctgtctcagcctcctgagtagctgggactacaggcgcccgccaccacgcctggctaatttttttgtatttttaatagagacggggtttcaccgtgttagccaggatggtctcgatctcctgaccttgagatctgcccgcctccgtctcccaaagtgctgggattacaggcgtgagccaccacgcccagccgagagagtcttttccactagagtctgtatgttaaaatatgcacgtgttaatgtatagacatggtggcatctctaacaaacgctcagaggacttcatttatttaagtgtgggtattattctatgttctgaatagatagactttccagaaagctaacttctctttaaattagatattgcttaatttggaatgtgatcatttcataaattaccaactgcttaaagtcattttatctctagaaaactcatttcattgaattaccaattagtaatattttgttgtcattaccaacacctacagttaactttgagattttattattgggaggacaaataatattgggtcagtatgatagaaaggtactcttttaagtctcattttatttttattttttgagatagggtctcgctctgttgcccaggctggagtgccgtggcacagtctcagctgactgcaatctccacatcctagttcaagtaattctcctgcctcagcctcctgagtagctgagattataggcgtgtgccaccacacctggctaattttggtatttttagtggagacagcctttcgccatgttggccaggctggtcttgaactcctgacctcaagtgatctgcctgcctgggcctcccaagtactgggattacaggtgtgagccaccatgcctggccttaagtcttattttaaccttaagtttaaactgctctgtgatgttaacaagtaggaaaatatatttctgtttttctatctttgtattttcttctcaaggaggtgttggtaagaattgagtataagtaacctataaactgcatggtgaatttctgtataattgggtttactataaactttagttctacacagtgcttgattcaactcttttgtagcagtgttcctgaatttttcttaacacatatccattccatatgttgtccttttcatacctagctttctttctcttcttgtctatctcctgatcttggtttggagctagtctctctgtttaatttttataattaaagcccaagcaattttttacacattcaagtagtacttaagagttaaaacctgtttctcttttgcccatccttatttacagtgtgtattttacttaaagaaaacattgaaatctttttttttaacagaacaaatttttttttgaaattcttaagatgtaaatggcttctaattcattaaatagtatcaggaaattgagctaaatgtttgagtcaaaagttcagcttgatagaatgtggcagaacagttgactcaaaaagacagttcggcagttttcccaacttagctgaaaattttaaaagtcctttttacctcatggaatcagccattttaataatttgttgaacaggccaataaaattagttcttaatgtagttttaaagaaatgattttatttttcataatggtatgttggttcggatactcatttgtcaagctgtgattgtagttgcctgatattgagagcttgtaattatcactcagtgctcctcactgattcccattaagcacctctcccctatggaatagatatacttagacactaagctagtgggaaaggaattctcccttactgtggttgaaagtttttgtaagtataaagtaatatgagttctagcccattgttttatttagagagaggaatactcagcagctgcttttatgttacttttttcttgttaatggccaaatccttactctctaaggaacatttttgtttttagagaaagagaaaaaaaattctaaatattagctgtatctttgaatattagccgtttcaaatgttatattatgcataaacagcaatgcatgtgaaagggaattaagtgtaaataccaacacctggatgctttttatacttgtagttcaactaattaacaaattaaatgaaacctaaatttagtatttctgatctgggagttgaatatcaatttttgcaatagtgtatgataaaattgtatgtaaatatttttcatcgttggttactgaattcatgtaattctgtctgtttggagttgtacattctggaccatgacataaaagctaatagacaaaatagtgaaacacaaccagtggttctatagccaagtaagtttcatcctacctctaattgattctgagcgagaaagagaggcaggggccagaataggaggggaaatagacttagtcttatgttaggagttgagcagcttgtactactagaaacctaaaaccctactgccatgtttattcatgaatttattatttaatataccatttgacgatatttacattcttaatttggaaaggaaaatgttctgcttgaagagatagtatatagtagatgagttgcacactgttttataaagttcattccaacatgcagccaaggatgagaaccactgttagcaaaagtggtgaatttcattagaggattcatcttgagtagtgttgagagattttagttaggctttttatactgttttaaggctttggtgagatttctagcttaggagcctaattactatttataccagttcttgtgaatacatgtgattctcataaaaaagaaatgtattataattgccttttaggaaatgtctttcaaaattgcctattaaaatgttaatattaacctttatggattgacttaaaaatcactggaactactagtttatttataagtccatttatggcatttatacatttttaggatctttaaaaggtagtttcttatacaacttatttattgtacaacatagagaaagcagcttaggaattcctaaagtggattcttaatttggaatattagaaatgacaccatatcttctaggcactcagagtgatcggttaatgtcatactgtttaaaatgctatcagatagtttttcttctcatttctgtaaattatgtttctgtgggattgggaaactatgggttaggaaatcaagaggtcagggataaattcttaatacttcataatgagaatatctaaatagaaacacacagtatttcagatcttcaactgttgtatttgccaataaattacctgaaagacaaagcatttgaacatccaggagctgccatatcatgactgggtgtcatggcaaccactgccatttcttttctgtcctaaggtcagatcaaagcaagccgagccctcctgctctgaatctatcgtggacagttgtgttagaatatggtgaaccagtgactctgaaatagtgattatttctagatgtggttttgtgaaatatattcctgaattatatattgtattacaagagtcataacggctgtcacagggacaattatcgatgtgttaatatctcacactgattaatcctcaacaactaatcagaaaaatcacagtcgctcactttttaaaaatatgtagaatacagtcatgtaagtgaaggtttatgttttgttatattgggagagaaaattttaggtgaaaccagatctttctttttgatgacattattttggtaggaccagatggatcatacttcctcaggtcatcatccaaacaaaaaaagaaaggtagcacagagtgaattttgtagtgcatctgtttttattaagtaattttaatgctgcaaaagcaaaaatggagtgtattggaatatcagagtaatattgatacaaggacatggagattttaatctaaattttaaaagtaaatataaatgaaattcatatgtgttgtaaaatgaaaatttattaagttttcttaaaattctgtgttaatgttctgagtctgcatatgtatatatgcactttatatttttgtacttgctcagcttttatgttcagcagaactttccaaacaacttatctattatagaatatctatactaactaaaagaaataggtttacatttacaaaaaaataggttgttgggaaagctaaggtatatctatatgtcagaatgttaatggcttaaaggcctttaggtttgaccttgtttaatccttttattttacagtaagggtgctgaggcccagggtattaagtttcttgcccaaatttagtttcctacttagtgacagagccgaagctggaacaataaatcttataattccctctcagagttatttttcatcatagcattctgtttagaagaaatagggcaactctgaatttacaaataagcaagttgcttgattagaaaagtaacaaatagtgctcactttggcagcacatatactaaaattggaatgatacagagattagcatgacccctgtgcagagatggcactcaaattcatgaagtgttccatattttaaaaaacaatacaaattttaaaaagagagtaacaaataccaaatattgccgacatacattttatattttaatgttatttttttggttttgcagcatttcagaaaagaaaattaaaggtttctttttgctttttaagtagtttggtgcaataactttctacctgactttcttgtttttcctatcagcttatatttataattctaagtatcacatttgtgtgttttgtagatgtgtgaaaactgttaatatttaatggcaagccatgtgattgaatcatgttttaaatctcctctaacactatcccaatttggatattgcaaaaggagatgttccttgtaatgcctattattttaataatgtagtctaactcatataatacagtatctatgacaatatttgcaattacattttgatatcagtgcagtaacagatgaaatttataagccagttgtaattgacttgtcaaacagtaggtccctgactgataaataaaacctttagatgaaataactttttttcttataatatttatactcttgttaacctttggaattctaaaaatggatagtggatcaaattgttcttgcctattatttagactttcttgtggtttttagatttactgcgaataatgagtgttttcagatacaccacacaatggcaacttgtcagctactgtatttatatgtgagatagactagttttagagatagccacatgataccaacatatgaacttcagtctattaggggacaaatcatggctttttcaatttctctttcagaacaaaggaagaattatgcacgggacagtgtcagcagtgtgtcagatatatctcaataccgtgttgaagtaagatgctttggtgtttgctagtatttagagtgacccttgaggaacataaaaattggaagttaaatcagaattctgttttatttcattcttatgatgtattttaagttgcattgacctttttgtttagattttttaaaacagatattacatataaagtatcttgttagtctgtggtctattttcataaagaatgatttaaaatcataactactatccatttatccttgccagtcttatttcacttataatagaataatggcttttactttgtactatagaatcttcttgaaattaagcctttgctagtttcagtgagcaatttagtttttagtttaactaaagttattgccagttctagttaaataatggttcttttttagtttttgccctcttttacgatatttgctcttgattggaatttatctggttgacctgtgcttataatagaaaatatttaagcagggaagtaatttttaaattgctcttattttcagttttctacctatgtcaagcatgcttaatcaaatttaaacagttttgtttcagtaagtggttttagtggattgaatagtttgacagttcctatagactagaattgtgctgttgctacaatcagtgtccatagttttgaagctcccatacagatagcctgctgtttaaatgctgctatgttcagcatttaaataaccataatagagtgtcaaataggggaaagtttattttaagagaatattatttaagctgttaagaatttgttttaatgtcatgtttatgtagttcaacatggctccgtatgaaacagatttaggtatcttatgagtcaaaacaccatttcttctattcaaaaaaaaccttggttggctttattctctcattaaaatagtcatgaagttttaagagtactttgtgtttgtcgttctctgctagctgacctcaggttatttgattttcttttggaaaatgtatactaagaggttgtatgtgtttgtatgtgttataaatctttttcctttttgccaattgtaagcacttgactacctttgtcctggatcggaaagatgctatgatcactgttgatgatggaataaggaaattgaaattgcttgatgccaagggcaaagtgtggactcaagatatgattcttcaagtggatgacagagctgtgagcctgattgatttagaatcaaaggcaagtgtgtaaaatttatactattttattttcaagaaactccacaaatattaatgtttacaatcatttcagattgtttgaaaatggatggaagtttgacaaaataaaatgttcactttatttatagaatgaactggagaattttcctttaaacacaatccagcactgccaagctgtgatgcattcatgcagctatgattcagttcttgcactggtgtgcaaagagccaacccagaacaagccagatcttcatctcttccagtgtgatgaggttaaggtaaaagaatggtgaaatttttgtttcttctttaagcagattgtctgggagcttttgaattacctattttgataatatatctgcatattagttactagatttttagtttctgagcatctcgtaaggaaaacaaataccttagtatcttctctaggatttccatggcaagtaaataaagaaattagggtgatgttaatcaaatcagtagttcacacttgtaatcccagtgctttgggaggccaaggctgtaagatggcttgaggccaggggtttgggcccagcctggacaacatggcaagacccagtctctactaaaaaggttttaaaaattagctagatgtggttgtacacgcttgtagtctcagctactcagttggctaagggaggaagatctcttgagccaggagttggagattacagtgagctataatcacccctctgcactccagcctgggcaacagattgagattgtgtctcttaaaaataagatgcattctgtttatttttttaaagtgtagataatatattaaattcacatcaaatgccttaaacttataattaaaaattgattgttcagaaatcttgctttgtggacagtaaataatcatgtaatttgaatttattctgcactaatgacatagcatggattactgcaatgaagtacttagacatttcccacgatattgatttaaagttcaccatttaattatgtgacttgattcattgctcaggatttgtaattcccagatgatatgtgaaaatagttgagccagtaataacaggctatatcctgaaagtttctatttcaaagtacagtgtaatttcaaatgattataatttgtgatgctttattggaccttagaagttatcttcaaccttgaatgtgtttatttcctcagttgttttctttaaaagagaaatcattttgtgttaattggtactttgccaaagcagtgatttaacattttgatgatatattataaaatatccatgtaattttattttataaagaaactctaggagattagcacagttacttgatcttttctgtgttttttgacatttaaagatgatagataaagtaagattgactgtaaactgtattttataattttcttctaatttcaatttacgtcatggatgactttctaaaaaccttcttctaaaagaactggcatttaggtaatttgtgtaagtgatattcatcagatttttgtatagtgccttttgaaagtcatagtatattataatttttgtaaggttagatatattcagtcaataaatattaaagggaatattttgctttaaaaatatagtgaaatttaattcaaacatttttataaaccagaggcctaagttgaaaaacatttcaaatttgatgtttgtatctgtgttctaaaaagccccccccgggagctaaaagttactatgctgtgaaaagtttctggattttaggtttgggaacaaatggcttgctttacttgatatggaatggtaatgataatggattcaaaatgtatttactgaatatagttttgtcctaaccccaaaagctcacataccacgaagcactgtatgcatttactcattagtttcatactctgcatatgagacatttttcgcttggctggttaaaaatatagaggcaatgaaaaacgcagtttcttttatatggctcattgtgcaatattgcttttgatttttaaagtttctttattataggacttcatgcaatgctcctgcccacctttgcagtaaaatttttcttagaaatataatagccccagtataagaagttgaagattcctaggcatcttcagttttcattttgggtttttttaaataattatttttaattaaatatcttttcatcttcagttttagtatcctatgtaacagaaagcctttgacacgatatttgtaatgtcttattgaaactaaatgctcttaggaagtcacactggactgggatgcattggcctctcatttaactagcaatgtgaccttggccaggcccttttatacaagtactcctcagttttattaattagaaggaactgatgagatgctcttttaaatatcccatcatttctaaagttttatgattatcgatgcttactgtaaaagaaatacaacatacatatttgagaaaacattacagagaacagggaggcccaaacatagatggtgcatctcatcaacattctaatatagagtaatgatcactggctctaaacaaactttgcaaccaaacagaaacttcgtatctgctaatctcacgttgctccccaagaaaaatctaactgaatgttctggaaaagtagtggaaaagttaattgtttgcagaaagttaacttttacctgaagtgacaaaataaagtggttacccaaaggggtaaaacctagcgttggagtttatcttatgggtgtagtagatttgccttaaactcaaagatttgttttgctgggttaatgggtgtccagtggatcttgaggatgagaaagggaaggaactctgttctatgtgtgggagcctctaaccccttaatttctacccaattagagatttttactcagtttcatttttagcgtgtacatatcctttctatcattgcctttattcaaggatagtttccctttaagataatcattaaaaatttcttcagtttttaaaatcttatcattatatagttcaccattataaaaaccacaagagtcatgttttgcaagatttttataaaaagactttttacatcaagatacttactgattcagacaaggaacaatccctttttctgttttaaactacatatcaagactcagaaaaatccataaactttcaggtaacttgtgtctctttgcaggcaaacctaattagtgaagatattgaaagtgcaatcagtgacagtaaaggagggaaacagaagaggcggcccgacgccctgaggtaaaagcattgaaagaaatcaaggagtggaattgatttgtttctaaggcttttttccccaaagagttagaaaaattattttctatggaagtatattattgtattgtatagatcataacctgtagtctcaacacatttgttctcccaagtttgtcagtgtgtttactcctcttctctccatatttttggtctttctctgatatggcttcacttgtgttggaagtcacagagtcatgaaagatgagtggcattttaagagaaggtatcctagggaaatacaagctagacagtaggattgtaattgttccatggccctttcaaatcacataagactcagaaggaaaatcaacctagttttcagctgactattaatttttttatttcatatgcattcataaatatgcataatgtgtaatgcttaggaaatccttattgtcccttgacatagttctttttgaattttaataactagtaccacaagttgagttaattgatatgttatagaaatagagatggtaaaaattctatttgttttcatctttttaaggatgatttccaatgcagaccctagtataccgcctccacccagagctcctgcccctgcgccccctgggaccgtcacccaggtggatgttagaagtcgagtggcagcctggtctgcatgggcagccgaccaaggggactgtgagtcttcctagaattaatacttattgaacacttactttgggttgggacatagttcttgctttcaaattctgatgctgatttcagaactgaagcttgaggttagtttttaaaaaatcaactctggccgggcgcagtggctcatgcctgtaatcccagtgctttgggaggccgaggcgggcggatcacctgaggtcaggagtttgagaccagcatgaccaatatgatgaaaccccgtctctattaaaaatacaaaaattaggtgggtgtggtggcatgcgcctataatcctagctactgggatggttgagacaggagaatcacttgaaccgggaggcggaggttgcagtaagctgagatcacgccattgcaccccagcctggacaacaagaccaaaactccatttcaaaaaaaaaaaaaatcaaatcttagataaaataaagttaagccttgaattttgttaagattattatctgtaagagtttagacccaccatttaataaatatggtattagggttagagtctttttatttttttaatgctaagaggaagttttacttgattgacaaaaagatggcaacaaaatatatacaggtttttcttaaagattgcacttaacattctttccattttttattatctaactagagtccctttttggacaagtttgtcatattcatggaaaggttgtcaggacagtggttggctgctggcagtggagaagggtaaaaggtatccatcatatgactgttcttgtcaagtgggccctatgagcgtggcatcatttcaccttggcattctgtttaaaaacaattataacatagaacttagtgttactttttatatgttagaatattttactagaatctgaaatgtttataactaaaaaaatgccttaaaatatgtttggtctagtatcttcattttaaggacgaataaattgtgattcagcaggctccaatctgatgaactctagagcctcattcttttgccgctactccagtggaacttcttaacttcttattctttatccagtaaagtattattcacacagggtatctggcactatagttaaacgatataactcatttccaaaaatgagtcacctcggactctactttggatgtgcagagtaaaagttggactctgaagcaagacctgatatgtctacctgtgtggtcttgggaagttatctctctgtacttcggtctcatctctgaaatggggataataattcatgggttgctctgaatctgaaagtaaataatgtttatggtagtacctactacaaaatagtaagcataatttgtggttttcattttgccaaattgagttcattttctttctgaattgttttctattttgtttaggtttcttgtattcttaaaggttttttcagaggttgaaatgtaagccgagctaccaaagatatgaaaaaaagaattctttgatgcatttatttaaaaaaaaattaattaacagagatatgtagtttaattttataacagtttccgttttcataagttatgtaaatttgtattgatctgctttgtatttaaaatgtgtttaaaagacagtaatttattgtattctatactttttgtgtacttatggtgtttttgttgttactgtttcgatgaagagggtctgaagtagaggaaggataagacaagtttacagacattctgaacaaacctgtaaaaatatatgttgaacctaatatatataatatatattatgtatattatatgttgaaccatatatatatgtgtgtgtgtatatatatatatatatatatatatatattattttttttttttttttttttttttttgagatggagtgttgctctgtcacccaggctggagtgcagtggtgcgatctcagcttactgcaacctttgtctcctggttcaagcgattctcctgcctcagcctcccaagtagctgggattacaggcgtgtgccaccatacctggctaattttgtatttttagtagagatggagtttcactgtgttagccaggattgtcttgatctcctgacctcgtgatcctcccgcctcagcctctgaaagtgctggaattacaggcgtgagccaccatgccctgctgaacctaatataatttataacaaagacagaatttatccctaggggtttctgagctttcattaaattttatctgaaatattttctgcaatgtcatctgtttaagtgagataaggctttcagaacttctaatttaccactagcctaaacagaagacttattatatcaggtttggcctgggtccagtccagtttttagttggaaagcccctcaggaggaatatctttttggttcctctggatgctccagctgactcaggctgaactgcttctccgttgaatccctgaggcatatctacccctgacttccaaaggtgatctctgtggaatagcgccagtggcactagggttcctagtcgtgtttcagacctgacagagcccaagaaataccatatctccccctcactgtgccctccaaatgatattttttggggcctctgtagagttcctaatagctatttcaacctcaacttagtactttctgtggtagtccactacaaccaaggtagcagctatctatgtgtaaaatagtagctaactggcaagatttcatagatagaaattttaattatcttaaagtagttaacagccgctaattaagtttcataagacacgatgatttcttctttctttttttttttttttttgttggcaagtgttccagttacaggtaaagttagtgtaaaggaagaatagcaatacaaagtgtccaatttttttttgcagttctctctattgaacatcatgagtcacgatgatgtatcatgagttgtatttccatttgtggtgttacgtttctgttgttccatccatatattttgaaatttattctaccatgagatatctgtaacaactctctgtgtttagaggcagtattaactgactcataccaggaaggagttcatgataataacttcatgattaacatcatgctgtagccaactgagcaaccttaataccctgaatggtcttaagacatttattttttaatgtgaaaatttctgtctgcttttaaagcatgtagcttaaaattaatgagcccaacattgtgggttttaagcttaattacactagaattttaagaagcactctgctgtcagaactccgaaagctttattgtagtcacagtgttggaatgtataaaaattatagctctgttgcattagaacttagttgaccagcttttgagaagtaaaagcttgactgctggtttatatttctggcttgtgtaggaattaaagggtgctaagttaaggttggttctacaggtagctgactcagggaagagagagaatggggtgatattacaaggtaaattaacatcataaagttgagaggactaatacttaagctctgctcaactgctcctgttagtattgacaaggatgcatttcatggctgatgagcacagttttgacttgtgtatccagtggaggtgttccctttggcaaatggtcctcctttttaactaatttttatgttttaattgtctgtattggtattgtgggagtaaaagattgaaagacttatgattgtcctttctatagttgagaaaccaaggcagtatcatgagcaggaagaaacacctgagatgatggcagcccgcattgacagagatgtggtaagtacaggagtcgcctttagatcactggcttttcttttaagaggaaaaagaaaacttcataagaaaatgaagctgatttaaatagagatattttatggaaaccatgttttctgttacctgtgatggctatgccctttgaatttgccctttgaattattttctcgttaaacatttttgcctttatgccaatatttagttagtagacttgggctatgatagaagaatcagcttattaactagtttacattggaacttaggctgaattattagatttcaggaatggtacaatttttattttattatcgtttgtaattcataattgaaatatctttttaatatgtcttcttggcatttattaacaatgtattttagaatacctaagagataaaagttaagtggcatttttaaaggatagatttgtaaatcgtaaagcttttataaaagataatgctacatttgttttctttatagtgatttacagaatgagaatgctgtaaatgctttattatagcattttcattctttaaatgagatctagaatatgatgttaatacattactttttataccatatacatgttaccagcttattgagaaacaaatactgaaaggaatttgaaatttctaattcaatttttacagcacactattacatgttatacttaaaagtttaaccccaatttgtagtcttaaattagaagaatgtcaagtttcacacatactggagaaaggcaactaagactatagtatataagataatcaaattcattccagtgatctctgaaagcatggtgcattattctattttgtcatgtggaaactcttattaatgcttagtatcctagactagctattaggttatcacaacaatctgtatacctttaattccatgaagtaatattgtcagtgctttattgggacatttatcagtaaagcaaaaatgtcagtgctcttctaacaaaacctattttagaattttcctcctaactgtgtgggagaacactgagaaaattagagtaattgaaaataataatctgagcagatattgtgaatgcttccttgatgacattgaaaatagagcaaaagtaagctaaagaaaaatgtaaatgtcagaatatggctataggtatatttagtttgattcttgtaattagtaataaacttgaaattggcatgtgggctgcttccttttctaaaaaaacctttctattatttactaacagagtacagctaaggtaaaaatagttttgttttatattttattctataatttctaatttcagcaaatcttaaaccacattttggatgacattgaattttttatcacaaaactccaaaaagcagcagaagcattttctgagctttctaaaaggaagaaaaacaagaaaggtaaaaggaaaggaccaggaggtaagttggattttcttaatcttctaatgcctggttagatctccagtactggctgggcgcagtggctcacacctgtaatcccagcactttgggaggccgaggcgggtgtatcatctaaggtcaggagttcgagactagcctgaccaatgtgatgaaaccccgtctctactaaaaatacaaaaattagccgggcatggtggcatgtgcctgtaatcccagctacttgggaggctgagacaggagaattgcttgaacctagcaggcggaggttgcagtgagctaagatcacaccattgcactccagcctggaaactccatgtcaaaaaaaaaaaaaaagaactctggtactaggcagagttttgaccctcaagaactacttagcaaaacttcattgactgtggactagggttcctcttctagttttggggtagcacttgagatttaggcaaagagtaagatgaactcagggaagagtccattttggttataagtcagctatagtgaagaaagatcctggaatgttttacctaaatcacagagactgagattcaggcagtgaccatctatctgtagttttcattagttattgtaaaattaagtatctgttaaagaaagacatagctctattcttgtagttggatttattctgttgtaaactagaaccatattatttgttaaataaaagggttgacttactaaaatatttaaaagtttcaacagatttgaattttttatcacaaaactttaaacggtacattcaggtcacatacaaagtcacatacagacaattttgaagtatgctgcagttcagctatttaaaatggcctcagctatataaaattaaaattatggaagtaatgtttatacttcctctgacaaaatggtagagattgaaagatataaaatagtaaataaatatccctttcattacagataacttccaaatctttctgtagcacatatttgtataatgagcatatgacctttggctttatcttctgcatgtgaatacatggatgtgcttcctctccacatattctgaaattaagtactattgcttcctggtatcttaaaccacttattccttttgaaattctctatgaaaggtatactatcctcttgatcacccagattcaaaaccacagattcttctgtgacttcattctcttgcttatagccaacatcaattttattttctcaacatctcctgtatccagttttttcccttttcattttcatatctagttcaagctactatcattttttttaaccctgctttcgaagcagtctttaagcctctactttttcatgctgtgagaacaatcttcttaaagctctcagtcacttcattcttctgctgtaaagcacgctagttccatgttctattgatttaagtacaactgttcgccctggaaatcaaggttatccacaatctaaccttgatctacccttccattctcatgtttctctccttttgtttgttgtttcgtatacatgcaattccccctttccttgtttttgcttatgctgtttttatccaaccatgatgtttttcccaccacatcaccctggaccaaactttttcaaatcccatcttataagctactttctccatctaataccttttaagtatccatttccttatctcccaaccaggtaagtctcttctcataacgattggtacttctcttgttatttatctgattcatgtattttattagcttttaaggcccttagagcagggcttgtcagttactcacttgcacaatgtctgccatagagaaaggctacaatgtatgtttatggaattaaatgagtaatttgtagtgcctaaggatagagcaatccattttgaaatttgtatcttctcagtttgttacagtcagactatgagatgtagcacggtaactaggtagcatgtctgatgagatcttcaaactttacagacataaatgtggtttttgtttttccatttaataaatttccttggattttgctctgatcctctcctctcgcttatttcattagagggtgttttaacgctgcgggcaaaacctccacctcctgatgaatttcttgactgtttccaaaagtttaaacacggatttaaccttctggtaagtgaaatttatgtatatagaattagaagaaataaatggaaaaggtgaaaatctagtcaggatgtttctgattaaattaagaaataaaattgtttttatagattttgtgggggtgtgtatgttttgatttgccttcagttaaaacagcaaattttaaaacatatatatctaagagacttgattgaaaaacaatgacttctattctcactctatccatgctaaagaatatattaaaactgaatctggtggtaaagaccgtcccctctgtgtctatgttggacctttctgagtgtctgtcttgcttgatagtaatctgttttctgttttcttcatgttgcaggccaaactgaagtctcatattcagaatcctagtgctgcagatttggttcactttttgtttactccattaaatatggtgagattttattagtttaagaaagaatcgttcttagtatattttttaaccccaagtgtctgtctggattatctagactgcttttcttcattaccttgcgtgggtactatttctttgccatttgtgtaaacatcaagaatgtaaaatttgagaatttaaaagaaccctgtaaatcatctagtttaagcaccttattttatagttgaggaaactggtatctctgacagtgctagggatatgaaaagaaataaagatttattggataccagtatttcaacgtatactagtatataatatccagtgccttgaataacgtagatgtttttctcattctcacaaaataatcatgagaagtctagttcttgatggatggtttgctccatgaagtcattcagagacccatgttctttttatcgaggtgttccttcatctcttgaactgtctctgacttgtttattcatttatgcactggttctacaaatacaaattgagagccttctatgtgcttggctttatagtagcccatcaggaacaaaacagacaaaaattcttaccttcttagaacttatattgtaacatagtggggtagccaataacctaaataaatgtctgcataatacagtagtctaaaaatcacgtgctatgcagaaaaatagaggagtgaaggaaaactgggagttccccagggggatgcacgcatgtgtctatgtgtgtgggaaacggagtgttgcactttttgagtagggttggttaaaggaagcctcactgagaagatgtcattggagtaaaggaagtaaggaatgggtcatgtggatccctgaaagaagagaattccagacgaagaatagttaacgtataaatgttctgaggtgataacatgcaaagcatgttcttggaataagtagagctgtgacttcaacagaatgaagaaaagattagaaagagatgatatcagcagggtaacaggaagacacatcctgttggtctttataagggattgggagacctttgacaactgaagagttttcagcagaaaaggattgccctggctataatgtttagaaattttggggaagaaaaagctagggtcattattaaaataatccagatgggggattatggtgcttggacctggtagcattggaggtgatgagaagtctgatttggttataaatttgctgctagattggatatactgtgcaagagccaaggatagctcccagatttttggcctaagactaacaggatggagtgatgattaactaagatggggaagactgggtagagcaggtttttggaggttggtgaaaaattcagttttaaacatatcaaaattgagttgtatccagatggggaaatttgaattgatcgttgagtatatgaatttggagttcaatggagaaatcaggccaaggactgcttgagccctgggcattcgatgttaggagaatgggaagaaccagcaagtaagattgacaagaggcagtaagggaggataaatctcatccttctttccccagggataagtagacaagacctgaattagaatatgaaatgagtattgctttacaaacataggaaagtaagtaacattatcaacatgaatgtcagaagctaagcaataagggactagaagatgaaagtccaagagtacatcaataacttatgaatgctcctatatgttgttgctgtatatggagcatcagatttctacttgcctaattatttctgaataattcttgctctataaatgcttttaaaaaattaggtggagatcaaggacatacatatgcaaagaaactgatactagttcattaacaaaatttgtattccttagtttttaacatttttgatgctatcttagagtatttggaagtattatttataaagaagtttttgctgcctcctcttatttatttcacacactttcagagatcatatgtagatatctagtcattacacagaatagagctgtaacataacaaggctggtttccctgacatatacaaattggtctttgtgatcaggttatgtacctgaaaacattggtttacttgccaatgtttagtatctctgcttttctcaaaaattacaccttattaatggtctctccaatcataatattttgctggtccatttaatgttctccctacagggccccggacattttacttggacgagggagatggggaggaacatctattcagggcctgctactggccagcatgatgtagtggctttacacctgcgagttgctctcctcttccctcagcatggacatgtacacacgagcgtagccacagcacatgtgcctgcgcacgttcttgagagggaaccatggctcttaacctttcatttatactttctttcattttatttcctcttccttctgttaaatcaggtatttttatattcctctactcattttctttagttttacttttccctcttattgctacatatttattggaaatgcgttcgaggttggaagttaaaaattactgtgctagataggcagggtaggttttgttctcaaataagagttagctttcctccgttatctgccatcttttttcattcattccagtaccactgtatcatctgcagttgaaagtcagataagtcttagtccaactcctcaaggaggggaaactgaaaagccataaattacagtgtaatagtgtaatgtgttacgaatatgcataaattacagtgtaatagtgtagggtgttactaatatgcataaattacagtgtaatagtgtaatgtgttactaatatgcataaattgtttagaggacgcaggctggggagtggtacatcggagttacactgtggggttaacacaggctttcacaagagttgggacctgagtagagttctgaataatgggggaatggccttctggggaactgggaacagcatgtacaaatacacagaggcctagaacagtatagcatgctgagaacacctggatgattggagccattcaaaaaatctcctatcttcttgtgccgcatctctgagaaggtaagattttataaagagactctggtttctgctctaggagataactaccattttttttttagccagaaaatagctcataagaagtaaatttagagcagtttttgaacatctacttatcctcattttgcttatcagagaattgcacctgtttgtttctgctgtcattaaattatccatattaaatcagaggaattttctaaaaataattctggggaaaagtaccatagattcagagtaccagttctcattcctgttttgccttccttcctggatccttttattttttgtatgtgtgtataggcacagccatagactgttaactctcgatagtattgtttctcttgatagtactcatttcgggaaccgcatttttcaagtttggcataatagatttgccagtagagaaacacatatttaaaacaacaacaacaaaacaggggtagtaaaatcacctgatctagaattctctgcatagcctttggtatcttccagagaaactatagtcatatgcagcccataggcagatgctgtgaaagttgttaaattgttaactttcatttaggttttaaagcactgctgggctgggcaagttgatttgacaagcttttcttcattcagtagcacattgcacagcatcaaaagttaatatgactattaaaaagtagtgcttgtttttgccatgggtttttgtccacacattttgaaaatacacaaagaatagtaatcttcttgctaaaaaatggtttattatcttaggtggtgcaggcaacaggaggtcctgaactagccagttcagtacttagtcccctattgaataaggacacaattgatttcttaaattatactgtcaatggtgatgaacggcagctgtggatgtcattgggaggaacttggatgaaagccaggtaagcatttaccacctataatgccttaagtaccattctttgttaattacatggatctaatgagacatttatttaaccttctacatacgaaggactaagcgtcataggatgaaaaaacctaaacccttaaaggctagaagtctagtggaagagatagaagtgtatgtaatataaggcatgatataccttaggagtgagtcataaacaaaatgctgttggttggcaagggggaccagtcaggaagaggatttagacaggagggtagttagctttcaaagaagagctgtcatttaaaatcgacaggtacacatagggttcacacacacatacacatgcgcgcgcgcgcgcacagtgcttgctagtccatgcactttacagaactactcttattatccctattttgcagatgaggaaagtaaggcacagagaggataagtaatttgcccaaggccacacaacttgtaagtgacagagcagggatgtgaactcgtgccatgtagctctggagtcagtgttcatcattggtttgctaaactgccttttagcaggttgggtaggatttccacagttccatagtagggcaagggcctgtccaggtagagagagaagcagaagtgaaggcataaggtagtcaagagaagaaaggatgaagatgtgtttctctggaatatggacttcgggtagcagatcattgtggaagggcgggaggcggatggtattaaaatgagcatatagagatgagcatatagagatgagggctggattatgcaggctttcagtgccatgctaaagagttagagtgtggttctgtaggctgtggagaaccaataactttgtgaatagaggtgtgacataattacatctatgttttagaaaggtcagtctggtagttgaggctagaaaggacaaggacaaaagtaactggaggcagaggccttttgagatgctaatatcgtaggagaggctccttataaatcaattttcttcaggactagagagtcacagtggaactgaaaaggaagagtgggtaattttaagaaatgtgcatttgtcaataaagtgattatggaagacagattattaacaattgtagtactaatgcttgctgagcaaggcaaggtaagaaaatatttctaatttcatgattgtaaataaatcatttttgctttgcttatttatctaaatctttttctttatttcaccacttagaataaatcacttagtatggccacttagacatttgtcttcctaatgcttttgaatgggctagcttaagagtcatgggccaattcataattttttttctccatttttctcctattgaaacatatacaaacttttccacttattttctggactttgacagtggcttgtgttggaatatagttaagcagaaaattctttgaaagcattgcagttgttgcttttaaattgaaaatatttacatttatttatattatttatgtactagtatagcatagtgtatgctgtataatagtgttcttgttatactgtataaaaactggttaaatagatctttttatttttataattttaattgatacattattaatagttgtacatattttcagggtacatatgatagtttgatacattcgtataatgtacaaaggtgaaatcagggtaattaggatatccatcaccttaaatatcttaaatatttatgctaggaacatttgaatttttctcttctagctattttgaaatgtacaatagattagtgttaactatagtcactttactgatctatctaacactgggtcttagttcttctagtcaatgtacgtttgtatccattaatcaacttctctccatccccctgcaaccctgcctcatccttgtcagccactagtaaacaccagtctactctctaccttcatgaaatccagttttttagcttccacatatgagtgagcttatttcgcttaatggaataacctccagttccatccatgttgctgcaaatgacaagatttctttcatttttatggctgaataatattccattgtagatcacttaaatctattagatttatataggttatgattttatgataagcctcggtggcatcctttaatttcatgaagtttattaaattgatcaggtctcacattacaaatatagctcaggctctttaatttctttgtttagggttctatcttaaaataagaaaattaattaacattcaaaaaactacatcaaaacgaaatatattgttagctgttaacacacggaaagggtcattttagatcctgattgttaagagtattaggaaatgaatgtactgactgatttaaaaactcataaaggtaaaaagaaccatgaaagtctataacaatctgaataaaatggctgatttcatcatagtagaactataacatgaagaattaaatatgaaagatgaagcaacatattctagcaaaaatgaagccctcgtttttgtcctagttatttttgtggttcatgaatgattaggatcttacagaaataagtttcactcagtgtcattaaatgatgaacccatatgattgtgattacagattagtttactgattaaaacagagctgatacatttaatttataaaactggccatctgtttcagtttaggggacttcataaatttaaaaatcgtaatcttaacttgctgggctgtttctcttttgaaagatatatctaataccaggaggtttcaataatgatgggaggggagtgaagggaaagttgagaatctgaaactactttaaatgttagagaagtttgtgctctaaatacttatcacactcctagctccataatcccttcttacacaaatttttaaaaacctatatccatgttacaaagttgagtttaatggagaaatgaggcaatgttgggaaaacagatcatgcaacagaattcaatctttctttcattttattaaggtgtgaaatactggcataaacatgtttgctttttctttttgggtggatggaagacagattaggtctatgtgctgtttttgttgtttgttatttatgtgtgtgtgcgtgtgtatgtctagccttactgaagataactgtgagcatggatacattcctagattttattgtttatatgccttcattccctcctgcagagcagagtggccaaaagaacagtttattccaccatatgttccacgattccgcaatggctgggagcccccaatgctgaactttatgggagccacaatggaacaagatctttatcaactggcagaatctgtggcaaatgtagcagaacatcagcgcaaacaggaaataaaaagattatccacagaggtagttttttttttaacattgccctctgtagacagtgtaattatctgtgtattctcttgtaattctgattgcaagttctcattttattcaactgaaaattgttctagaatcaaagtctgaatgttaccctgtcctgaattacctctctctcttgcctctgtcattttttgtgacagttgctctgttcctccgtgaagcccaaccccaacccaaattgctctcctatagcctgtcagcccccacccctccccttgttgccactgttttcctggctctggcgatcctaagtcagcttttttaggatgactttctctccttgtcagggaattgcactactgccctttggcttatttctttatgttttcctctcccattatcaggccctcaagacagttccctgaacctagatcctctaacctgtcttaagcagctgtttcctgaattcccccagttaattaatttctctccttctcttcacgttgctttgcctctcttctcctctgtttgttttctttcttcccttttgcctagttctaaaactctggagtcctatcagccttgctagagggcccaagttcttctgcactctagtccttaggctcaaatgatcatttataaaactacaccttgaggagatcttaacattcattttatcttttaagtatttaataatatttagagtataacctatttgggaatcaagttgagggaatgaaattgagtatgctgttttgtcacattccctaaaagtgatgtttctatgactcttcttgtttgttggaaaagaacattgaacattgattaaagctggaccaaacacaaataggatgatcagaacccgaagagttaggtgaatgagatctagtttgaagaagaaacagtaaatgatgactagatcttcccgaaatcctattatttttatttaattccttagattaattttctcagactatcataggtatttataatgtggcaaatatgttatgagggaatgaattgtcaaaccatggtgtattatatcctgtgactgcttttaaggggaaatgtttatctaaattaaattttaaaaattgttccctttgtggactattctttggacaataaaaataatattatagaagtttggttgaattcctgaaactttaaaaataaagcaaacatattactttgaaattattttttcctaatgcaatttttttttccctctggctgtattataagggaagaggtggattccatgcctgtctttccctctaaatgaataattaagatgacctcactgctcggttggcaagcatatacccctgcctgtatttcatagttcaggcctcatcactgtgaattttctttccatttaaagggtagtttttctagaggaaagaaaatataatcaaacatgaaattatgatacacttgctgttgctatagttacagctgactatttttacatcataaaaatttctagcttatagccttcataccttaaataagaaaatatactcactttataatgtatgcctcagaaattcacttttgtgatttcgttctcaatttgtgtatttaagaagagagtaatgtgttctgggctcccaggatataagtttgtctactttcactgaataattaattttaaaagaggaattattgagaatccttacttgtaatgagttattattttcctgttataaactatatttcattttatggctgaagtagttattcagaggtttaaaaaaatgaaaaacacattctagcagttccagggaattttatgccttgagattttgttggaaaagaggccaagtaattgtgacttaaaaagcaaaaaaacgtaatcatccctaaaagagatactttattatactttattgctactataataaatgcatttacaacaagacttgggtaattcaggatctgatgatttttgtttaggattgaaagacataggtgacttggagtgacaaatatgggtggcagtactcagcttccttacttcctctgaaccctaagcaaactttggtagtcatcacagttagtcatttgtcatcatttctcttctccctttcagtattcgcagttgctctcaggacccagtgatttcctactgctgacttcactgttatgttcagagctgggcaaaaggtgtgggtgcttccaacagttagagcactcccctctttagaacagcctttaattaaagattacctaatctaatgtagtgcctctactctttcccagggaaatgataaactgaattaattgagctcagatttttttaatttaaatggctgaaacttgtttatttttatttatgtattaattacagtatcctgataatgtcacctgctttgtccatggataaactcagccctcctcctgatcactttgtcattagaattaactgtggtaaccatatgtccaagaattttctgaaacattcccagtttcaatattttgccccaatgaatccataaacaaatatacaaaatccataatgaaaacagccaaggaattccagtgcttcagtgtctatcatgctttctccatacctcattttcatataaagaaacaaagtaaaggctttggggagtttttatttgttttctcccaatctgagcatgtattctctatagcaggggtccccagttcctgggtcgtggaccagtactagtgcgtggcctgttggaaactgtgcctcactgcaggaggtgagcagcaggcctgcgagcattactgcctgagctccatctcctgtcagatgagctgcgcctttagattctattaggaggaagaatgctcttgtgaactgcacatgcaagggatctaggttgcacgcttcttatgagaatctaatgcctgatgatctgaggaggaacagtttcatcccaaaaccatccccatcatccccggccctggggtccatggaaaaattgccttccatgaaaccagtcctgctgccaaaaaggttggggattgctgctctatagctttaaaactgtggtcctcagtgggacctatgaacctcaactgtcactcttggtagctcccagtagtctcctgtctgaattatcttaactgcaaaagagaagtgactctagcattctcttatcctggactcttgactgtcaagatcagtttagttgtgcctttctgtgtttcccttaacagtaaatatgataatagtgctgctattttaaaaatattgaaaatactataatgttctgtgtataattttgaaattgagaaaaatgagaagccggtataattttaatgcatagggttcagttgattttcatgtgacaatatttactttgctagagtggtgaaagtttcttgaacagagagagcaagattaccctttgcactaatgacttttcttattataagtaagtatttgacaaaaatgtgtcactcccatttgataatgtgttaacataatggtcagtcacttgaaaatgaaaacttatcacaatatagttgagagatcttgttgactgacctgagtgctgattcaaatagtatttggtgattctttaatctgccccactttgtctttcagcattccagtgtatcagagtatcatccagccgatggctatgcgttcagtagcaacatttacacaagaggatcccacctggaccaaggggaagctgctgttgcttttaagccaacttctaatcgccatatagataggtaacatttaatgggcaccctttggagagctgtggataaatgtctctgatctagtgctaacagaggtgacagtgtctgtattgtctactgcttctttaaactttccatctgttaattagttgataaagtttcagttgttcctttagagaactggttttgatcaacaaaagatgtctggaccttcagtctgtaattcccatttagtgcaaatgcctttggatgactttccattttttaaaagatacttcggacaaaatgtgtacattaagaagaaagaattgtcttgaaaccctccattagtttgtaccagatggtctctgaggatccttccagttctgtagcttttaaagaaaacagtttccatctttatcttcacccaatgaaaacaaataaaccttcctttagacagatatatttaaactgaatataaactaaatatttaaacagggtcaatgctttattagtcattcttgccatttcatctttttatcttgactttccagttttacatttcatttatttttctatatcttcactcttaaaaaatttaatataggcagagatggagaattgggatgagaagaaataaaggaactggaataagttctttttttttaatttccaatcttgtttttagtaaatgagatctacatagagccaagccatgtagaaaagagaaaaggaggtaaaatcttggtaacacggttataggagaagggtcattcagtgaactgggaatagagaactcggcctagtactttcctgcctcaaaagcctctcttaccacaagagttatatgccctttacttcttttctgtatactcttttcttaatataatctgaagaaagtgggatttaaaatttttattctttgtcaggggtggtgacaggtaatgcttaagtaattgctgtagaaattacacaggtataactccaagggcaccagtgacattaaattgagtacaaagaaaagtcagcaatgaataatatattttttaaatgccaacatatgagaatgttttaattacataattaattttcagtagatacagttgaaaatcagttttgaagcttaaacattatttcattgaaatccttaactaagtattcatcttaatattttcttttttctttctgtctgtcttagatgtcaatattttagaaatcatttcagattaataggtttctttttgttttatcactccagtaattcagatgattttccacagctaagtagctagaaaaccacttgagtacatatgtagagtacatattgacactagaaaacttttatcaggttccatttgaagaccacatttagcatactgtggtcactcagtaagtgtagatttatttgattgatggattggatgaataagtgcatgagagtatatctagtatttcagagtcactacttccctgtccttcacctgcatatctataagggatagtattactgatggaataacctctgccatttattttgggcaccttaccacagagtcttttaaaagcttaccttgatttttatgatctttatagaatatcagggcagtatacctttcatttattgatttagttatatctttgtaccccttctgcttccaaaatagattcagttagctcacttaaattatatgtagttaaagtggtattattattgaaagttaaataatgaaataaaatataaaattaagaagttaagagggaagatgagaatttttataaaatataaaagttgacactattattgaatttcagatttgtctttcagatttttggctgtcagaacaaaaagagaaacataatcattggctgacattaggaaaaggaataagtatcagttcatcgggataaaaaatgcttttcttactcctaaattctcaataatatttgtttcatgaaacttaatgtaggatgggataggtgatgtcagggacatttatttttaacaattttttttcctcaccacagagaaggctgtggtgaattttataaggtttctttttgtaacctttgataaatagaaatttaaataaaatataaaaatagaaattccatgaagggataatagtctagagtggtcagaatttcaccatagaaagaatttttttgaataccttgagtggtgggtagattttatatctcagttgttcttatggattctgtctcagctggacttaataggagctaggatagttgataaatacatgaatcattgatgttctatgttgctaagaacatttgtcatcattttgaaaaactgtctgaaaattgtggtctgatataaaatacacagaggtttggaatttgtttttataaataattattgttgaccttaaactctattacataccaggaatgcagtagatactgttaaaagaaaaacttcacacaaattaaatttaacagtttttttttttttttttgagacagagtcttgctctgtcgcccaggctggagtgcagtggcgcgatcttggctcactgcaagctcggcctcccgggttcacgccattctcctgcctcaacctcctgagtagctgggactacaggtgcccgccaccatgcccggctaattttttgtatgtttttttagtagagatggggtttcaccgtgttagccaggatggtctcgatctcctgacctcgtgatctgcccgcttcggcctcccaaagtgctgggattacaggcgtgagccaccacgcctggcaaatttaacagtttaattgaacaaggggaaaaaaaagtggcacatgaattgggcagcccccagaatcacagcagattcagagagactccagagatgcctcatggtcagagcaaatttatagacaaaaaaaggaaagtgacgtacagaaaacggacgtgaggtatagaaacagctggattggttacagcttggcatttgcacacaatttgaacagtcagcagcctgtgagtgcttgaagtatggctgctgggattggctgagactcagctattgttacagaagcatactcctaaattgggttttcaatgtgtctacctactaaattaggttatgattcgtccacaggactcaagtatggaagtatagagggtttctcagaacatatttagcttaacaatgccatacgaagtatattcactgttctgtgaaattgctatgccattaggtagaacatttgttgaatttagagcccacgccttcgagttttatagcttactgctgtcagatgcaattagtattttagagaagttctcaaattactgctgtctctatgtctgctctctatcaagtggcgtatctattattcctaatcagaaactgagcccatacgttttgttacattccatagctgttaagaaactttggtacctcttttttttttttttttttttttcgagacagagttttgctcttgtcgcccaggctggagtgcaatggcacgatatcggcctactgcaccctctgcctccctgtttcaagcgattctgccacctcagcctcctgagtagctgggattacaggcatgtgccaccgtgcccagctaattttgtatttttagtagagatggggtttcacgatattggacaggctggtctcaaactcctgacctcaggtgatccgccctcctcggcctcccaaagtgctaggattacgggcatgaaccaccacgcctggccaagaaagtctggcatctctgaaaaattacaaattgtgattgtctgtttgataactatggtcagtgtcatatccatgcttaacatatagagggcaaaaaactgtgagccataaagatttgtaaattctgaagcacttcaggtaaacacttctgagacctgcaagataacaaaaaatttgttatagacccttaactctccattattaatagtgattatcttgcagatcataggagaaaggaaaataggggaagagaggaagataaaacactaaaattactgttttcctaatgtttggggtagttgaatctcttttatctgccaaatgaaatcttagtagattaaatgtgaatatataaagtaaatgaaagcagagctattccagtagggatagggatgggaaatccatggaacacagttttaaaattattattattaataacataattacttcaccataatttcaccttttccaccaattttctttttaatgtgctaaaaatagccaataagctgttcttacatgcttatctgtaaggtgttctatactggtcatctttttgctttgtccctgtctccctcctccaatggagttactacctaagaggtaacaaaaacctatgacaggatacattatgtctacaactgtcctgcaggccctggtataacattccagagaacttggtagacagcaaaaagaatggcaactttacaggggtaggatgacctaacatctttagtctctacctgctatttcccttgtagagatgtgtaaataaatgtgggaatgtaaatggaggagaagactagggagtaaaattaataaagggttaaagtaattttattattgaaatatatgaagaaaatacaaatatttaatgcatcaagtgtattatgttacatataaaagtaatctttagttaagttgttaaatctattagtactcatttaatgattagaagaggtatttggttttttaaggaagttttattttaaaaaaatgaggcccatacactttttaaaagtttatagtgaattaaattatttacttacttatttgcaagtgttactagtctcatacttaatgcatatctcttttttttgcaatttagataactgggcaaagtgtttctaaaaactaatgcctagttataaattttaaatttatatatttggttactgaattgcagacattgcttgaattagtgaaatcaacatataactaaaattaccactatggaaattatcttcagtctcctttaactttatgaaaaatactaacatttatctttatctagttcttttatggtagagatggtaattaacataatatccagtatgtgtatttagtagacaaagaattcatagacttggattctggatttggctaagtaccacctggccttgtgattttgcattatttgtttttatccctggccataatttgttcattttaaaagcaagaactttaaagtaacttttatttatcataatgtaaaatataataaaatgaaactgctgtaatttttcagaaagttttctggtaggatttggcttgtctcagtgttttccatttttatcctttaggaagagctagcagaataataatcttttttctttctttttatagaaattatgaaccactcaaaacacaacccaagaaatatgccaaatccaagtatgactttgtagcaaggaacaacagtgagctctcggttctaaaggatgatattttagaggtaatataattttttcttttttatactcttaataaagtagttttattgtattactcttttggtatataactaaactttccttcaaaagtattatattactaaagacgtagtatattagaaatatctacatctatttagtaggggtatatagatactccttctaaggggatagctttagaatactcctttatttgttttttgtggggagtggcagggtgggtttttttttaacttcctttgctctcttccttgccctctttcttcttctgatatttattcattttggagtcaagactagttaacaattcagatgtggatgcacataatagttcaataagagacaacattctttttttaatcctatatccttgcacagatatactcagcagtcattgagctaataatgttagggataatccaccacaacaccaacttctctttgttagattctaattgacagttcatcttcttgaatatataaggtgaattatcacaataaattttgtaaggaaaaaaagtaatttttatatactttttctttctatcaccaaaatggagacaatggggctttccaaaagagtcattttagtccttaagtcctttaagtactttagtccttaagtacttcaaataatgcaggctgttctttggaggtaaaatggaccttgggtagattcaccataatgataccttacctactgtatactcataaatgtcttcttagtgtaattcctgagaatcattcaatcaacactatgttgatgctgagttaattatcagaagtagaaaaattttctttgttgaagtctagggaacttctttcgtagaatggcttttatatggaaattatacctttattttcttgtacatgacagatacttgatgatcggaagcaatggtggaaagttcgaaatgcaagtggagactctggatttgtgccaaataacattttggatattgtgagacctccagaatctggattggggcgtgctgatccaccttatactcatactatacaggtgagcatgatttcttagtaaaatgtagtatgtacacatttacgaagttatcactcttaagtaggatttaaacacctttgtgtattgatcattttgagatgtagttggttatatattttttctagagtaattggtgggggagtggcaatggtgagagacacagggaagaattacacatatgttttctgatttacttctagaaattgttcaagatgtttagcagtaggtacctgattctctgaatgctttttttccccaatctgtagtatttctgacatttgaagaaatggtatttctgtctttttacccacagctctgctatccaccaggggcttcctcttgatagaggatggcactgatatcacggcatggtgtccagcagttcaccttcaccagcccttgctttcagtctcttaaatgttctgccactgaccagccttgaacttgcactcatctcaccttacactaatacatgagtacctgttcacctggattacaatatttttcctctcttgattttaagattaaaaggtacttaggatatagattagataggtcaggctctctcttcttgttcattgaaggcccatgaaggtccattcttatggcccatgccacattttcaggatttcagtgaccctggtcagctcattcaccctaacatctgaattaacttgctcttaaactccggaattttagacctgtgccaggctctctagagttaggtctgtaaacaaagacagaatggatggactctctcaggtacagccagtgaacctggggtggcttctcattcccccagaaagaactcttttaattttcaaagtctcgagaaaaagatcacatctgacctcataataatgtcatgaatttgagtagaagctgcgtagaatatgcagtgaaatagttaatttttatgccagatctaggcttaaaaaaatacagattgtccaaagctggaattgtggtcatacttctgctgccgtgacaatttatttcagtacttttggctcctcatgacattcatgcctggtgtcagtcctgtgcttatccagagggacttggccttactagaatccatgaatcaagcaaacattcaaaataaagaatttgtgtatagtttctctatctcggtaacttaaagtgatggcaatggaaattatttgctgtgttatgttttggctggcctcatgtgcatatatatattatgtacttattttatgttcatcatttgtcattagctgttgatgccaaagaaggagtttgagttattcaaggtatggtctcctccatttcccatgggtttttgaagtgaattttcttagtttttatacctttttcttttcttagttcctacttttctgagtttaatatctgtttacctaatataatatatgcttctgtctggttcatgaataccagttcttcattttctttcccatagaggtagtatatgcttgaaacctatacttaaaataatggtagagtacatacctttgggctatatcaactaattttaatatgcaggtcatggtaagctatgagaagcactattcataaaggatatccctgatccccatatgtgagcaaaaggcaagagtttatattttaagttttgaaaacaattatccaaatttgttttatttgtgtgtgtggttgctaggaataagcaaactgcgataaaataaaaaacatgcaaatagtatgaattctataataggaattttctcctacctgatattcctgaaaagtttaatatctcttaccttttgctgtttactgttcagtcttgtctttttctttaattctgattcttggcttgagccataagttgacttttctgtttaaaaggttgcttctgtctaaaactgaaccaaaactattaatatatatcatacgcagggaaagtattttcagagaatgtcaaacctattcctcctttcttaaacagaacctcatcttttatttttgtcaactttggcacaacccaagaaatgtttttaagagttcacaagtttcaggagtttgttttgctactttatgtaaatagaaacttgtggttcttatagggattgcctatttggctatttcgttttaaacttttcaacactatcctactctcttcttaaaaattcgggttgcaactacaaatgtagtggtgtgtgtagaaatgtgtacagaagctttctgtgtgtatgcagaagcgtatgctgttcaggttgagggccctactttgaaaatgtattaaaaacaatctgctttttaacacctcctgaaaattttgggctgagctcaacaaaaccactaagaccttgtaaaattttaataagcaagcttcacagtctgctttgctatctgctatctggcataaatcctactctaaaaggattcctattctcaaaacatttataatatattctttaaaaaaagaatagagtaaaatggaaaagaaaacatccttggaaatatgtgccagtcatttttctatctctacaacagtagatacccatatctactgtttcatatctctacaacagtagatacccatatctactgttttatatctctacaacaccagatacccatatctaaaatatctaaggaagaatcctgcaacttatttcagaatgataattaagataccaccatatttatgtagattccactgatcctaataccctaaccttataaaactcaactggattacaattttatgtcttactcatctttttattcactcattccacaaatacatattgagtactggcatctcacacacttggtaaaaagaacaatagaaagcctagcgccgagcagatccttcccgaaagcctgcatgagtccacaggtcatctgccatggctttgctccttcctgcatgcttgctgtatcaagagcagcgtgaccctctttctcctcctcagatatggcccacacatttgttttctcttccatctgtctctttcatccagtgatatcaaaactttgaagaaatataaagaaactttaacaaaaatattttagattcctgcaccatgctgccaaaaggaagcaatgattcattacttaaatttgcttcacattcacagaaaacaacattcacagatactcctctctagagaagatatgcccgtggccagtgctcatgctgtgccaggcattgtttgagcacttcgcaaatccaaattcatttgattcccacaacaaccttgtgaaggaggcacatttttttgtaggaaactaaggtgtaggagaaataatttgcccagatttatacagctgtatgaagccaggattgggccccagcactctggatccagagcctgtgctgtgttgcattctgctgttctagagaatagtgattataaaaggttctcatttcgggtgggcacaatggctcacgcctgtaatcccagaactttgggaggccgaggcaggcagatcacttgaggtgaggagtttgagaccagcctggccaacatggcaaaaccctgtctctactaaaagtacaaaaattacccaggcatgatggcacacacctgtaatcccagctactcaggagactgaggcaggagaatcgcttgaacccaggaggcaggggatgcggtgagccgagattgtgccactgcactccagcctggcgacagagcgagactccgtctcaaaacaagaagaaaaagaagaaaaaacaaagattgtcatctctttttgtataaacccatagtttttctctgtattaatgtttaaagtgatattttctcagaatagctttactttgcattatactgtgataaaagttgatctgatcagtcacaatccttggaatttgatttttgctttatgtatccattcactggatttcatggtattgttcattattttataatttaggaaaataacccaaattatatgatttacttagaataggacatttttgtaagtggtggaaataagggaattagatgtaaactatttccatgcaacatctgtgagtcaccaaatacttaaaaaaagggacagtcatgactcttatttttatacccttacatttcctataaagacatatatataaataatggcagtttctgggtgaagggcacaagtgcagctcttgcctattgttcacacactttttatcagagattctgttctgatgacagggatgctcataccaggcagtgaataggtgttgaattgccacctggtgtccctgagagtctaggctatttaatatcctcacatttgaagtgatttttaacagctctgtaaagacaaccattcccacctaatgtatttcccccatggcttcagcaaagttttaaacataaaagagaaagtaataaaaatttacaaaagatattgacacaaaagattgaataaaccacagagaaaaggaagtaaatgctgaggagagattatggagagataacatgtcttgataaaaatgttgtagagcattccaaggctttgtagtattttagctgggcagcagatggacatccagggttctttctccccacctggaagctacttgccacataaagtttcctgatctttattttgacttgattctctgacctctagccctgtgactgctcgtctgctagaattacccttttgcccatttaaatttgcaaggtatatgccaagagcagaaaccacctcctcccgtgatgttatttattatatatccaatggactgactaaagaagtctttcatatattcttaattattatctatgcgtttattattgttataggtattcttactctaccaagatgcaagtaattatgaatgtccagtctctgtggtcacgtgaattcaacaaaacgtttcccatattctttattgtctagcaagagatactgtaatatgatactgtgtgaaaagccccaatctaggtattggtaggtgagggttctagtccttaaagagagcattttatttttctgtgttccaatttgcttggtcatgaaatagaaggagtcagttatgtgatctctacaatccagtctaggtataaaatcttctcattcattatatacatgtttaaatcaccctaaaataaaagtggaaatgttttgtacaggtgactactaaaccgctaacactactaatttcagcctatgttattagtgctctgttttttaagctcagtacagacatttagctactgctggatagagtgacgattttaccaaagatggcttatattcttccagccaggccaacctcctgataatattcagttcttcaaaagtgttttttaaaaattaatatcagaagactctgctcattaattataggcatggtttttagacaaagatgtttactttttattctgtcacatgtattgacattttcccagagacttcttaatgataatttgaataatacccactataaatatatatatgtgtttttatacatatataaagtattgataattactgtctgacatgcacatgtacataattttattaaatgttctatgttcaggctgcttagaaagtttgaaactaaagctcattacaatcacacgataatgcatgcagtattaccttctgtaaaatcagctaattaaacaagaataactcttacatgtaatgcattctaattgtattctttatgagcaataggaataaaataaacctatatcttagtattttacttgaatatacaaatagttactgttgaagtactttacacggtttctactatagtagaatctatatgattagttttccatggctagatagtgatgggaattaattatagatttacaggctccttcactggttgattgtgggcatgtaattttactgtcaggctaatttactctttctgatatttgatgtgaattataattgatattattttaattccatttcctgtattaattttctcatttgatgtgatttgctccattttcctaatagcaattacttggcgagctgtcagaggtaacccacattcgttccctcatggcacttctttttaatataattttttggattcagtctctcaacttaacaccctccaaatgttccagctgtgcttagttttcactgcagagttcccaaataaccaaatttagaggaaaaatgtgtaatttagagtaggttaaatatttaagaacagttcaattttaatggctttgttgcgcttacttgcataatttcccctctgaagcagcatcttgtatgaatcaggatcttatctctcaatagcattctttaattctttagaatttctactcagcttaagttgctaaagaaaagtgactcattccaacttaattatcaataggaaagtaaatttcctatgaggtctattaattctgccttctttcagagaaagagagacaaaaagatagattttgcttttaacagaactttgtgtttgtgggctatcacaggcaagagtaaggaagtgacagttgggtgcaaaagtaggtccacaccaggctgaccaaccctcccagttcccagctggggagtctgaggggtttgtgaagatgtggaactttcagtgctaattactgggaaagtctcaggccaaccaagaacagttagtcagaatttcttttttggatttggagcttcagtacgttggttcaggagaaaaaagttcagagtgcacttctgttctccaagacattacgtaaactgagatacgttggaatcattaactctgtagcttcaacaaaaaatagccaaaagacagacataaggaaaggaagaacagtagttgggtgttaggtaaagaggagtagagaagctagggagggagacagaaaagtgacgttaggagtcagtgctgattctttttcttccacatgaagaatttcaaaccagtttccatggaagagctgtctaggttgccattcagaaccagttgtcacgattcaaggaaggtactttgccccttttaatgtcagaggttggaaacatggggcaggaggagaggactaaggaaagaggaaaatatgcaagtaaatataatttatggcatacattttcatatgggtttctttaatcaaatatgtattttaaacctattattttggtaggtcatactgataaagttgcattatgtaacaatggcatgaatgaaataaagcacagaacatttggtgagtttgttttcaggcttgattgtgacagtaacacagtttattcactttctcacaatagtatttgatgaatagcaaaagcaaaaattatgaatcatatggaaagcagggctcatggcatttttgtttgtttaggctttaaaaacaataattgaaactatgatgcttttgaaacactaatgtgagaattcatttgcccttcatgaaattacgtgcagaggacattcttgtcaagggaacattgcatatacattaatcagatgactttggtgtgtgctaagtattacattctggtgatgtttgctgtattttgactgctttaagtattttattggcccaaatataggaagattgtttgtggggaataataataacaattcattctttcattctaatacagtattgaatacattaaaaatatttctaagccttgaatgctaaggggattagcaactcagtttctgtcccacctaactccttctcttactctgagaatcttaccctttactccctccttccctcctgtcctgcctctctcctccttgccctccttcttccctcagcatctaccagcattataaacactcctttcagatatacttccatcctttcataatacgcttcccacttccttgaccccatcccactggtcagtgagtagtagagcgagctgaaaagaatgagggctccttcccacaccggtttccacaggtgttagtcatttgccgtgaagtggactgatgaaggttgatgtgttgtttttgagtaatagtttaattaaaaagtgatgtgtctgtgtgtggtgtgtatttttgtttttgatctctgtggaaattgggaggactctgttaaaatcaatactacctgatatttgggccattttagaatttaaaagtaaatactgttctaatcaaaggaccagattaccaaaaggtctttttgcatgtaatatgctaatcctaaattagaataattaaaattgtgccagtgcagtatctaaactttgccttaattacaaataattgtcctgtatctttgattctaaaaagaaaatgtgccttttgagaatttggagactctcacaatgcattatctattaaaattattttacttagatttaaagtgttaactattatgtgtgttttaaatagggaatatgcacaaatgctgttttataagtatgcctaacaatcatgattttaaaattattaaaaagcattttgtcacacctaccttttttaatacaaatggccacaggtccctttctagtattcgtttgtaagttgcaatcataaacatttaaagaccataccattaccctcacaaccatccaccccgtgacatttccattttaacaagggaaatttctaattttaataaattagcattaagatgatggcagaaaaagttatgccttgaacaaaataataccaatattttaaaattatttattggaaacaaaattaaaaatctttgaatatagcgtacatttaaaatgagtaagtgatgctttatgctgttgacatttagacttccagtgcaattggaaattattattagcataaattaaaaaataattataaatctttctgcctcccctcatcttgtgtgattccaagcccaaattctgttttcttgacatttattactataatactactatttgctattgacgtagccttgtgactccttaactaatgttttgactttgaacaaattatgtagaatgtttaaaatatgatttttaatggtcattataccatataggattacagataaatgagtaatgggtttgcaagtaagtttaaaaatagccaacaatgtcctatcaaagtataatttgttttcctagcctaggtttatattttttaaattttaagttaattatttgtctttttatagaaacaaaggatggagtatggcccaagaccagctgatactccccctgctccatcacctcctccaacaccagctcctgttcctgttccccttcccccttccactccagcacctgttcctgtgtcaaaggtcccagcaaatataacacgtcaaaacagcagctccagtgacagtggtggcagtatcgtgcgagacagccagagacacaaacaacttccggtggaccgtaagtttcccagggaggcaaaaaatgtcttctgcaaattaaaagcactactaagtaaaatattgtttactgctgattctacttgtattaaagtcctttatacttgcatggtacttaatagattgcaaagattttcacctggtttctcatcagctacgtagttctgagaaacaggaagtattctctccactctctaatgcatgcctttctactccttttccaatctgttatgataattgaatgcagactctggagccagacatcctggaatttgtataccaaaacaacacttgccagcttcctgaccttcaatgatttaattatcctctcagcacttcaatatctaaaaagtggagaaaaataatagtatctgcttcataggataagtgtgaggatttaatgagataatgcatagaaagcatctacttcagtgcttctcagccaggagcgattttgtcttcttctccatccttctgaggacatttgatattgcctgaagacatttttggttgtcaaaactggggggatgctactgatgtctaatgggtagagaccagggacacttagcaacaattacaatgcacaggacagtccccagcaacagagttatctggcccaaaatatcaatggtgctgaggttgaaaacccctgactgattttgacccctgtatgacacgtaatatgcagtcactaactacatcctgctgtcgccatcatcatcatcatcataaccttcctacttctcttcctcttgtttgctattcacagtagctgcacaatcacactatgttaatataatcacctgccaatagtagtctcagatttagcctccaaattcaaatttcatgtgacttacacttcagtgccatattttcataacttgaaatttgatgtttcatataaatggtttctatgaaaaccatatttaagtaaactaaaaagacactatgaccaactttggattatccttatttgtattattggtgaatagcagtgtagatattttgaaaactgaaggtagttttaagataaattttgtttaaccttgtagtatatggcatgtcaatttaatctccaaatttggtgttttaaacgtattataaagttacttggctttacctatacttgatgtgtaaaaactcttggaaaaccagagctatgaagatatttcatatttccccaatatgacaaaagtatatgaagtgtgtgtgtgtatgtgtgtgtgtgtgtgtgtgtgagtgagagagagatagagagacagagagagagagatggatatctatctttccctcaatgtgggcctctcttagggttctgccttcgttttccacataaacatacttttactgtagttcattctatttccatttctttcaatactatttatattgttgggaaaagaatgattcccaaattagtcatcgtattaaaactcatctctgacatccagataccagtatggaactattaactttatagctgagattggatgctttctatttatgttcaaaactaaatggctgaatctttcactcccattttcatcctactgtttttctcacgtcagtaagttattgccacatctgttcagttgtggacattcttgataaaataaaaaataaaaaagacactaaaactattactatttaacaattctaaaaattctggttaaatgcaataagcataagcctacttttactcattaatttttctcccacggtatgtccaatttaaatgactgtcatatctatcttgccaggaaactaaaggaaaaatgaagttttggaaaagtgattagctctttctgtacagcaaaaacaactgtgtgcgtgagtgtgtagaaccataataaaatagaatatgctactaagtttttaaaattatgtggagtttttaaaaagagttttctttttcaaatacactaaagacatagttttaagatgagaaatttctataaatatttttattgagttccctaaggagaaaacttcctcttagaaatgactgttctcttctttattcttcccacaagtttatagcatttccctccgtagagacgtcagcacagtcatctttgacacggtgggactctttatccaggcctagctaggatcaaagttcatcggcctccagtccccatttggagcagtgtgtgggttaggacagtctgttctttgttcacgctgagaaaccaagaataacctagtgggaaagaggcatagtttgcatacttttaaagatagagaactctcctgataattgtgactcatcatgttgaagtctgtttttcataagtaaaagggtggcattggtgtataaaatataaacatctctcccaaaattaacacacatacttgtttccttagaatattaaaaatcttacaatatatttgcaacttatgtaagttcctttttaaaatatctcaaaaatacagtttggcattaaataaatatatttctttttataaaacaaatatttcttgataactttattgcagaacagtttttctctgaatgaatgttggggcttaatgttcttttagaaccagacagtagcacatatttcagtgtgtgtttattgatagccaaatttctctcaaaatatgcctactcatctacccacattctctgcttactgcctaaacttctggtaaaaataaaatgaaaggaactaggaagtaaatactcatagaaatctatcaagtagcagctatgaacaggggaaaaaagccaacatgcctgtttttacaacgtagcaagtggcaagagtgaagcccttttgtggaagtctgtgtgttgcctattcaaaataactgtgaagccttgtgtcatagaagctattcaggctgttttatcgcaggatcccaaaaggttctccttttatcgcttttaagatgccaaactttagttgctttgtatttctcccatttcctttgaaatggtagtccttttattcgaatttaatcttttgtaatcagagtgttactttagaaaggtgtaaagttattctggtttgctgttgtgtgttagaacattggaaatggaaagcaaaagcccaggaacatgttaggtggaggtttttttgtccttcctggaagaaaactatgctgtggactggtgatgattgatatactgactaagtcagcagatgagaaaccaaatcttttagtgtggtgatacattttattttttattcttttgagatgcactcatatgctgtttgacagtttgttgtagtgattttttaaaaggtagctaatgaaatgcacataatgtatacttaaatgtaacaatcaatagtattctctcttactctctctagcaccccctactcctccctccctccctccctccccttttccccttttttgattacttcaaaagatttcctagatacttgaggcattaaaaaaaattagactgaaataacactaactattcacactttcccttatttcccaggggcaccaaacactttctaaaaccctttccctaggggggaaaaatcatagaacattggtcacaaaaagctccctaagtgaccaggttattgtcacttgccaacttaattagattgttcttatttcttgaaagtgaaaacaaacaacgaacataatgtacctatgtatatatacacacatattttaaaatacacagacacatgattccccttcctgtacttttatgcctttcctatttttgtcatgacagtatgttcatatacacacacatcttttccattagcataaatggctaggaaaaaggagtagctagggaagttaatcaaaggtgattttaatgactttggctataaaacagccctctgctgaaagtcagaagatccagttctagctaaattattctactaattgaaatgtgactttgacagatcatttctctgtttttggccttcattttcttatctggttatgtaaggggtttgtacatgatgattctcaaagtctcggtgaaaaagtcagcagaatgcctcattcattcatttattcaacaagtatttattgaattaaagcaccgttccacgtattaggatatagatgcaagcaaaaaagggaagcatcctttttctcctcaggcttatattttaatgaaaggaggtaggttaaaaaacgattaagttggctgggcgcggtggctcatgcctgtaatcccagcactttgggaggccaaggtgggtggatcacgaggtcaggagattgagaccatcctggccaacagggtgaaaccccatctctactaaaaatacaaaaattagttgggcatgggcatggtggcacacgcctatagtcccagctactccataggctgaggcaggagaatcgcttgaacccaggaggcggaggttgcagtgagccaagattgtgccactgcactccagtatggcaacagagtgagactctttctcaaaaaaaaaaagatgatagacaaaactatctatcaagaaggtggtaagtggtttggagactaataaaactatgtggatagagagtgcttttggggagggattgcagttttatatacatcaggggaaatagaaaggtggggaggagtaagctatgtggagatgcgggggaaagcattccagacagagcagactagagtggcctttaaatttgaagagcaccaagggagccattgggagcaagagtgaagggctccagaagagttgtggagtggctttagagtggtggaggtcttgtagggccttttactgggagtaattaggatcacttgggaatgttttgagcagaggggctgcaacatctgacttgcattttttttttttttttttttttgagacggagtcttgctctgttgccaggctggaatacagtggcgctatcttggcacactgcaacctccgcctcctgggttcaagagattctcctgcctcagcctcccgagtagctggggccacaggcacatgccaccacgcccagctaatttttgtatttttagtagagactgggtttcaccatgttggccaggatggtctcgatttcttgaccttgtgatccgcctgcctcagcctcccaaagtgcttggattacaggcatgagccacctagcctgacttacattttaaaagaatcacttagttgttatactgagaagagaatgaagagaaatgggtagggtggtagggagtggaagcagagagatctgttaataggctggtaactcagaccaagctggcaacagaaaaaatacagtgaaatcattggattttggatacattatgaggtcagactaacaggatctgctgatggattggatgtagtataggacaggaatcaagtgcagctccgtggtattttgccagaactggaaagatagaattgtcattaagtgagttgagaagtctaaaaagcaagtctaagagttcataaaagcaagcttcaggaagaagatcgggaattcaggtttgggcatgctatatttgacatgcatttgagctatttaagaaatacccaaatgaatatatcaagtagacagcatatatgcacccaagttccgagtaagaggactggaaaaataatttggtaaccatcatcttttaaatggccatgaacctaagcacagtggtcattgatggaggtagtgctggcagagatgagtctcaggagtgtcccctagagcaccttaatattacttagttggagagatgagaatattcagaagaggatccagagaaggggagtccagaaacatgggaggaaaatgaggagactgtggtatcctggaggccacagggagaaaatgtttcaaggaggaatcttctgcttcaaatgtgtgctgataggttaaataagatagtagctgggaaagaattggctggagtttagcaaagtgtagtagagagatggggggaaaagcaaaattgaatttcggcgacattaagagaaaataggagaatgggaattggagtccactagtacaggcaacttttcgtgaactttgctgtaaaaggagcagaaaaatgggcagtagctgggaaaggacatggtaaaaaggacttgtttaaaggtaacagaaatcataaaataatagcatgtttgcaggctgatgaactgattcagtgaagaaggaaaattaataacaggataaataagggagaaatgactcagtatttgaataggcagagaacttgaggcctagtgcatacatggatagttagccttgggagcagggaaacagctcttatataacataataggaaggcaggcagaacatatggggaaagtgctgttaggaagaactactagaggaacttacggaggttttcttctaactattttattcataaattaggaaatgagatcagctcaaggtgaggattggggaatagggttagaagtttgtagagagaaagtagaatatattcaatacttgtctaagacagtgggcagttacatgaccttaggcaggacttcttggcctttgaggctgggttattctctgctgtaggagaggctgacattatagaatgttgtgtgcatcccaggcttctacccactgtgtgacagcagcagcctttcccctttttctccctcaattgtgacgaccaaaagtgtctccagatattcccaaatgtcctctggggccaaaactgtccccagttgagagccaccagtctaaggaaatgtagtataattgtcaggaagcattaacagccaagttaaggttcataatcatgaatttaacatgagatcattcagcattgttgtgttatattcagctgtgcaggtgcaggcacagaatacgcagaaagttaggtttaaccaggattggggttttgccaaaggagtacaatgaagagactagagaagagccagggagttattttaataattgatcatggcatttataccaggcgaggataaaagtgaggaaagatggtaggaacactagactgtaggtcctactggggtcaaggattatagagattggggttctagagagggtgatgtaatattagggattttcaaaaagaacctactccctgttggtgtctaggaaggaaatctcagatggaggaagtgcaagatgaactcatccacagactgaccattggtcggagtgccgctcagaagaaattccatgtgccacggcagaacgtgccagttatcaatatcacttacgactccacaccagaggatgtgaagacgtggttacagtcaaagggattcaaccctgtgtgagtctctctgtgaatactttgcaattctgtgtgtacaacatgcattgttttcaatttgcttagttagatgtcacagataactgttataaaacataagggcacagactgcatactttgtgccatactcaagaactcactatagctgttcatagctgaaaaagaactaaaataagcataaataattattctgatgccaccccattttcgaattggtagtatctgttcattattagttctttaagcaaactattggcagctttgaggcccagtagcttcttttctccatcagattactgtgatgtaacctaggtaggaccatggtcttagctgaacttcctagaccacataggacatagagcataagctttcctcctgctgcaggatatagtgtctctggcaaataaaaaatagtgttacctagcatcaattataatcttaatagaacttttcctttaataaacccatagtaaaggttctatttatctatctaaaagtctataaacatttcatatgtatttggcacaatgaactattagaataatacatattcaagggaccttgacatattataaactcacctacccagcatgattgaaaaatgagatacaatggttagtcaattgccaggttactagaaagttatctattccttctataaaacaccaaatcccaagaattggtattaaacaatgaccctaaaccgaattggctcatttttgatactttgtaattaataatctgtatagcctcagggtcatcatcatgaaagaaacttgtcattgccctaactataaagactgtagtggcatttaataagggttccagggtatggaacgcttagaaaagagaagttactagcaggaacagataattttctcctttgtttgtaggcaatatttttaatgctcagtttctttttcctttttttttttttaggactgtcaatagtcttggagtattaaatggtgcacaacttttctctctcaataaggatgaactgaggacagtctgccctgaaggggcgagagtctatagccaaatcactgtacaaaaagctgcattggaggtatgacttgtcaacctaaggtggtgtttttctgcaaattgaaagctctggaaacaactatttatgtccatattggccaatttccctttcttaacagagctgaattaaatttaactctgcttttgtaaatttgtcactgagatcatcaatgacagtttccagaaggttaatttgttataaatgctcatatgatgtgaagcttgagcacatacttttggaaacttgacaaaaagcataatgttctcattttatatgtattgactaattctataggaaatttaattttgacataacaatggaaattagcttctgagtgagtaagagccttaagaggccagaatccttgcctattcttaatatttttttttttttggagattctaataacgtataggttataagattgtaaaaccctggctgtgtgtgttaggtctagtaatacatctcaataatcgggaaagatacattaggtagagatcactgaaaatagagagcctggaaaagtatttaatcacaatggtctgtatgaaagcaggagagtcatgttttctagattgctttatacttaagcttccaatatcctattttagacttaaaatgtgctatatacgggtagtagtttccaactgttacatctcacagctcttaatagtttcatgaaaattatacttggactcaaatgaaagaatgtaggctttggcatgaaattgatccataatcatctctagcaggtatattctataaattcaacagttaaataattcagggtaaaatcacttcatgcgtatcaccccgtagccattctgaatcaagagaaaccatatttcccttggaggttttccctacaacattgatcttgaaggctccatattaaagtttgatttgattgctttccatatgttgaatattaataaggattatatatttttctcaagcagttttattaccactatatttaattttgttgagagtatataattacttcttcaaggtatgttagaaaatgccatattcctaaaattctgaattccttcatcccacacctgcctatcattattgtcatttgctgtcaccacccacttcaggatggtctcttgcttcttgttctcttcctattctctgcatgggaactgaggcagaggctgactacctgaggttcttcatgttcctcagccaccttctaccacctcaccctttccttggatctagttaatcttttagattatttgcctgtgttgccagagacttctgttgatgggaaaggagaaaagccagcatggtcggagggtcagaactatatggaggggaaactgggtgaattctgagcccactctggcctgagttaaaatcttctaaaggcagatcagtatcttgtttgagcccaaaagagtcctttgataatttaccatgttattatgcttattgtacacatttcctctttctctcagcaaacctagagtactatacatacattattgatttatctttatcatgttcaaatgaaaggcctggtgagtgaattgccttaacagactttacaaaatgaaaaattattaatgtgatatattagtgaagtgcagaagcttcacttaaaaagtagagctgttagctttcctaaagagatactagaagaaaaccacagtagaattttatcctgagccatttcatgatatgacctgcagcctgcacaagtcagtaactatcttgtctgaactgtttatctttcaggatagcagtggcagctccgagttacaagaaattatgagaagacgacaggaaaaaatcagtgctgccgctagtgattcaggagtggaatcttttgatgaaggaagcagtcactaatttgtttgtttgtatttaaactccattgtttttggcattattccaacatgctttgttttaagaagccttgaagggaatgtcagattcatttttcttgatgtaatttatcaccataaaaaaaaacccatgcaaacctgagtgagcacaggatttgcttctaggcccattatttttattaaaactgaaaaaatttaaactgaattttttgaccttggaaaatatttttcttactttaccaaggtgaagtttccttaattagactaattattttatccccatcccagggtataaacaggaattgttttgatagtggtggagttattcactgcaacaaagcaacaatgttgtccatgattcaaaatctaagcagtttcgattttgcctgtgaatatggtgtctgtcattcagggcatagctcactgtaggctagcctctgcttacttaagtctcttctctgacatactcaatggaagaatatttagatttatttaaagttcttaatgccaacagtttaaaaaaaaattaaaacatttgaatgaactgtaaagtacagccataccttggacatgcaaatataaatctatggagcattctcaagagagtttgtcatggctctgttgattgcaactccttgtatagcttgtattttgatttagtttatattctgcttattatgtatactgtgttcttatatatgagaaagcacaaatgcgaaagaggtcatgtcttctcaaaatctagcaaaggaagtagtctgcattggtgtgcattacagtattttgcttaatgaaagcctcagttctgaatgttgatatgagtagttaaaaggaagtggggccattttatgtgtttatctgtgtcaagtatttctggtaataagaagcacttaatttacacatattttaatcctgtgaaagattccacatagagaaaagaaagatacctaaccttcaacaaatgttatttttggaaacacaatttttgtcattaaatgttatattatttcacatatataaaacagatgttatgtaagaatgttgtatattttaacataaatcatttagagaaattatctagattcattaattttcatagtgcctttttcacatgagtcagctggaaagtctgcaataaacagtatttgctgtctgttaataaatggtttctgtctcatta

SEQ ID NO: 42 - DNA, 3159 bp, Homo sapiens
ctccataaggcacaaactttcagagacagcagagcacacaagcttctaggacaagagccaggaagaaaccaccggaaggaaccatctcactgtgtgtaaacatgacttccaagctggccgtggctctcttggcagccttcctgatttctgcagctctgtgtgaaggtaagcacatctttctgacctacagcgttttcctatgtctaaatgtgatccttagatagcaaagctattcttgatgctttggtaacaaacatcctttttattcagaaacagaatataatcttagcagtcaattaatgttaaattgaagatttagaaaaaactatatataacacttaggaaagtataaagtttgatcaatatagatattctgcttttataatttataccatgtagcatgcatatatttaacgtaaataagtaatttatagtatgtcctattgagaaccacggttacctatattatgtattaatattgagttgagcaaggtaactcagacaattccactccttgtagtatttcattgacaagcctcagatttgtcattaattcctgtctggtttaaagataccctgattatagaccaggcatgtataacttatttatatatttctgttaattctttctgaaggcaatttctatgctggagagtcttagcttgcctactataaataacactgtggtatcacagaggattatgcaatattgaccagataaaaataccatgaagatgttgatattgtacaaaaagaactctaactctttatataggaagtcgttcaatgttgtcagttatgactgttttttaaaacaaagaactaactgaggtcaagggctaggagaatattcaggaatgagttcactagaaacatgatgccttccatagtctccaaataatcatattggaattagaaaggaagtagctggcagagctgtgcctgttgataaaatcaatccttaatcactttttcccccaacaggtgcagttttgccaaggagtgctaaagaacttagatgtcagtgcataaagacatactccaaacctttccaccccaaatttatcaaagaactgagagtgattgagagtggaccacactgcgccaacacagaaattatgtaagtactttaaaaaagattagatattttgttttagcaaacttaaaattaaggaaggtggaaatatttaggaaagttccaggtgttaggattacagtagtaaatgaaacaaaacaaaataaaaatatttgtctacatgacatttaaatatggtagcttccacaactactataaatgttattttggacttagactttatgcctgacttaaggaatcatgatttgaatgcaaaaactaaatattaatctgaaccatttctttcttatttcagtgtaaagctttctgatggaagagagctctgtctggaccccaaggaaaactgggtgcagagggttgtggagaagtttttgaagaggtaagttatatattttttaatttaaatttttcatttatcctgagacatataatccaaagtcagcctataaatttctttctgttgctaaaaatcgtcattaggtatctgcctttttggttaaaaaaaaaaggaatagcatcaatagtgagtttgttgtactcatgaccagaaagaccatacatagtttgcccaggaaattctgggtttaagcttgtgtcctatactcttagtaaagttctttgtcactcccagtagtgtcctattttagatgataatttctttgatctccctatttatagttgagaatatagagcatttctaacacatgaatgtcaaagactatattgacttttcaagaaccctactttccttcttattaaacatagctcatctttatatttttaattttattttagggctgagaattcataaaaaaattcattctctgtggtatccaagaatcagtgaagatgccagtgaaacttcaagcaaatctacttcaacacttcatgtattgtgtgggtctgttgtagggttgccagatgcaatacaagattcctggttaaatttgaatttcagtaaacaatgaatagtttttcattgtaccatgaaatatccagaacatacttatatgtaaagtattatttatttgaatctacaaaaaacaacaaataatttttaaatataaggattttcctagatattgcacgggagaatatacaaatagcaaaattgaggccaagggccaagagaatatccgaactttaatttcaggaattgaatgggtttgctagaatgtgatatttgaagcatcacataaaaatgatgggacaataaattttgccataaagtcaaatttagctggaaatcctggatttttttctgttaaatctggcaaccctagtctgctagccaggatccacaagtccttgttccactgtgccttggtttctcctttatttctaagtggaaaaagtattagccaccatcttacctcacagtgatgttgtgaggacatgtggaagcactttaagttttttcatcataacataaattattttcaagtgtaacttattaacctatttattatttatgtatttatttaagcatcaaatatttgtgcaagaatttggaaaaatagaagatgaatcattgattgaatagttataaagatgttatagtaaatttattttattttagatattaaatgatgttttattagataaatttcaatcagggtttttagattaaacaaacaaacaattgggtacccagttaaattttcatttcagataaacaacaaataattttttagtataagtacattattgtttatctgaaattttaattgaactaacaatcctagtttgatactcccagtcttgtcattgccagctgtgttggtagtgctgtgttgaattacggaataatgagttagaactattaaaacagccaaaactccacagtcaatattagtaatttcttgctggttgaaacttgtttattatgtacaaatagattcttataatattatttaaatgactgcatttttaaatacaaggctttatatttttaactttaagatgtttttatgtgctctccaaattttttttactgtttctgattgtatggaaatataaaagtaaatatgaaacatttaaaatataatttgttgtcaaagtaa

(The sequence listing continues in the following parts.)

1. A method of assessing diagnosis and/or prognosis of the tolerant state in liver transplantation in a human patient, comprising the steps of:
(a) obtaining a biological sample from the patient; and
(b) measuring the expression levels in the sample of a set of genes comprising the following twenty two:
transforming growth factor beta receptor III (TGFBR3, NCBI Gene ID 7049), killer cell lectin-like receptor subfamily B member 1 (KLRB1, NCBI Gene ID 3820), asparagine-linked glycosylation 8 homolog (ALG8, NCBI Gene ID 79053), Fanconi anemia complementation group G (FANCG, NCBI Gene ID 2189), gem associated protein 7 (GEMIN7, NCBI Gene ID 79760), natural killer cell group 7 sequence (NKG7, NCBI Gene ID 4818), RAD23 homolog B of Saccharomyces cerevisiae (RAD23B, NCBI Gene ID 5887), SLAM family member 7 (SLAMF7, NCBI Gene ID 57823), TP53 regulated inhibitor of apoptosis 1 (TRIAP1, NCBI Gene ID 51499), protein phosphatase 1B magnesium-dependent beta isoform (PPM1B, NCBI Gene ID 5495), chromosome 10 open reading frame 119 (C10orf119, NCBI Gene ID 79892), T cell receptor delta locus (TRD@, NCBI Gene ID 6964), nucleolar protein family A member 1 (NOLA1, NCBI Gene ID 54433), DCN1 defective in cullin neddylation 1 domain containing 1 of Saccharomyces cerevisiae (DCUN1D1, NCBI Gene ID 54165), dystrobrevin binding protein 1 (DTNBP1, NCBI Gene ID 84062), N-acetylglucosamine-1-phosphate transferase alpha and beta subunits (GNPTAB, NCBI Gene ID 79158), proteasome 26S subunit non-ATPase 14 (PSMD14, NCBI Gene ID 10213), coatomer protein complex subunit zeta 1 (COPZ1, NCBI Gene ID 22818), S100 calcium binding protein A10 (S100A10, NCBI Gene ID 6281), ataxin 10 (ATXN10, NCBI Gene ID 25814), G-rich RNA sequence binding factor 1 (GRSF1, NCBI Gene ID 2926), and CD244 molecule natural killer cell receptor 2B4 (CD244, NCBI Gene ID 51744); wherein the corresponding gene expression levels above or below predetermined cut-off levels are indicative of the tolerant state in liver transplantation.

2. The method according to claim 1, wherein the gene expression levels are above pre-determined cut-off levels obtained from a control sample.

3. The method according to claim 2, wherein the control sample is obtained from a non-tolerant liver transplant recipient requiring on-going immunosuppression therapy.

4. The method according to any of the claims 1-3, wherein measuring the gene expression levels is carried out using a microarray or a gene chip which comprises nucleic acid probes, said nucleic acid probes comprising sequences that specifically hybridize to the transcripts of the corresponding set of genes.

5. The method according to claim 4, wherein the microarray is a cDNA microarray.

6. The method according to claim 4, wherein the microarray is an oligonucleotide microarray.

7. The method according to any of the claims 1-3, wherein measuring the gene expression levels is carried out by quantitative reverse transcription polymerase chain reaction of RNA extracted from the sample.

8. The method according to any of the claims 1-3, wherein measuring the gene expression levels is carried out by detecting the proteins encoded by the corresponding genes.

9. The method according to claim 8, wherein the proteins are detected by antibodies specific to the proteins.

10. The method according to claim 8, wherein the proteins are detected by a proteins chip.

11. The method according to any of the claims 1-3, wherein measuring the gene expression levels is carried out by HPLC.

12. Use of a kit for performing the method as defined in claims 1-11, comprising (i) means for measuring the gene expression levels of the corresponding set of genes; and (ii) instructions for correlating the gene expression levels above or below pre-determined cut-off levels indicative of the tolerant state in liver transplantation.

13. Use of the kit according to claim 12, wherein the means comprise a microarray or a gene chip which comprises nucleic acid probes, said nucleic acid probes comprising sequences that specifically hybridize to the transcripts of the corresponding set of genes.

14. Use of the kit according to claim 13, further comprising reagents for performing a microarray analysis.

15. Use of the kit according to claim 12, wherein the means comprise oligonucleotide primers for performing a quantitative reverse transcription polymerase chain reaction, said primers comprising sequences that specifically hybridize to the complementary DNA derived from the transcripts of the corresponding set of genes.

16. Use of a microarray or a gene chip for performing the method as defined in claims 2-5, comprising a solid support and displayed thereon nucleic acid probes which comprises sequences that specifically hybridize to the transcripts of the corresponding set of genes.

17. Method for selecting or modifying treatment protocol, either before or after liver transplantation is performed, comprising the use of the method as defined in claims 1-11.

18. A method of assessing diagnosis and/or prognosis of the tolerant state in liver transplantation in a human patient, according to any of the claims 1-11, wherein (b) measuring the expression levels in the sample of a set of genes, further comprises the following 23:

| | | |
|---|---|---|
| CTBP2 | C-terminal binding protein 2 | 1488 |
| CLIC3 | chloride intracellular channel 3 | 9022 |
| KLRF1 | killer cell lectin-like receptor subfamily F, | 51348 |
| | member 1 | |
| IL2RB | interleukin 2 receptor, beta | 3560 |
| OSBPL5 | oxysterol binding protein-like 5 | 114879 |
| FEZ1 | fasciculation and elongation protein zeta 1 | 9638 |
| | (zygin I) | |
| FLJ14213 | hypothetical protein FLJ14213 | 79899 |
| CD160 | CD160 molecule | 11126 |
| RGS3 | regulator of G-protein signaling 3 | 5998 |
| CX3CR1 | chemokine (C-X3-C motif) receptor 1 | 1524 |
| PTGDR | prostaglandin D2 receptor (DP) | 5729 |
| CD9 | CD9 molecule | 928 |
| PDE4B | phosphodiesterase 4B, cAMP-specific | 5142 |
| | (phosphodiesterase E4 dunce homolog, | |
| | Drosophila) | |
| ERBB2 | v-erb-b2 erythroblastic leukemia viral | 2064 |
| | oncogene homolog 2, neuro/glioblastoma | |
| | derived oncogene homolog (avian) | |
| FEM1C | fem-1 homolog c (C. elegans) | 56929 |
| WDR67 | WD repeat domain 67 | 93594 |
| ZNF267 | zinc finger protein 267 | 10308 |
| ZNF295 | zinc finger protein 295 | 49854 |
| EPS8 | epidermal growth factor receptor pathway | 2059 |
| | substrate 8 | |
| IL8 | interleukin 8 | 3576 |
| NCALD | neurocalcin delta | 83988 |
| NOTCH2 | Notch homolog 2 (Drosophila) | 4853 |
| RGS3 | Regulator of G-protein Signalling 3 | 5998 |
| PTCH1 | patched homolog 1 (Drosophila) | 5727 |

wherein the corresponding gene expression levels above or below pre-determined cut-off levels are indicative of the tolerant state in liver transplantation.

19. A method of assessing diagnosis and/or prognosis of the tolerant state in liver transplantation in a human patient, according to any of the claim 1-11 or 18, wherein (b) measuring the expression levels in the sample of a set of genes, at least comprises gene SLAMF7.

20. A method of assessing diagnosis and/or prognosis of the tolerant state in liver transplantation in a human patient, wherein (b) measuring the expression levels in the sample of a set of genes, comprises the following eight genes or combinations thereof:

| | | |
|---|---|---|
| CTBP2 | C-terminal binding protein 2 | 1488 |
| CLIC3 | chloride intracellular channel 3 | 9022 |
| KLRF1 | killer cell lectin-like receptor subfamily F, | 51348 |
| | member 1 | |
| IL2RB | interleukin 2 receptor, beta | 3560 |
| OSBPL5 | oxysterol binding protein-like 5 | 114879 |
| FEZ1 | fasciculation and elongation protein zeta 1 | 9638 |
| | (zygin I) | |
| SLAMF7 | SLAM family member 7 | 57823 |
| CD160 | CD160 molecule | 11126 |

wherein the corresponding gene expression levels above or below pre-determined cut-off levels are indicative of the tolerant state in liver transplantation.

21. A method of assessing diagnosis and/or prognosis of the tolerant state in liver transplantation in a human patient, wherein (b) measuring the expression levels in the sample of a set of genes, comprises at least one gene from the set of eight genes of claim 20 in combination with one or more genes selected from the 22 genes of claim 1 and/or from the 23 genes of claim 18

22. Use of a kit for performing the method as defined in claims 18-21, comprising (i) means for measuring the gene expression levels of the corresponding set of genes; and (ii) instructions for correlating the gene expression levels above or below pre-determined cut-off levels indicative of the tolerant state in liver transplantation.

23. Use of the kit according to claim 22, wherein the means comprise a microarray or a gene chip which comprises nucleic acid probes, said nucleic acid probes comprising sequences that specifically hybridize to the transcripts of the corresponding set of genes.

24. Use of the kit according to claim 23, further comprising reagents for performing a microarray analysis.

25. Use of the kit according to claim 22, wherein the means comprise oligonucleotide primers for performing a quantitative reverse transcription polymerase chain reaction, said primers comprising sequences that specifically hybridize to the complementary DNA derived from the transcripts of the corresponding set of genes.

26. Use of a microarray or a gene chip for performing the method as defined in claims 18-21, comprising a solid support and displayed thereon nucleic acid probes which comprises sequences that specifically hybridize to the transcripts of the corresponding set of genes.

27. Method for selecting or modifying treatment protocol, either before or after liver transplantation is performed, comprising the use of the method as defined in claims 18-21.
